(19) United States
(12) Patent Application Publication
(10) Pub. No.: US 2026/0109988 A1
(43) Pub. Date: Apr. 23, 2026

(54) COMPOSITIONS AND METHODS TO MODULATE TUMOR MICROENVIRONMENT ASSOCIATED LONG NONCODING RNAS

(71) Applicant: HAYA Therapeutics SA, Epalinges (CH)

(72) Inventors: Samir OUNZAIN, Lausanne (CH); Emely MöLLER TORDENMALM, Mont-sur-Lausanne (CH); Daniel Roman BLESSING, Saint-Sulpice (CH)

(21) Appl. No.: 19/424,522

(22) Filed: Dec. 18, 2025

Related U.S. Application Data
(63) Continuation of application No. PCT/IB2024/000333, filed on Jun. 21, 2024.
(60) Provisional application No. 63/523,001, filed on Jun. 23, 2023.
(60) Provisional application No. 63/587,332, filed on Oct. 2, 2023.
(60) Provisional application No. 63/651,270, filed on May 23, 2024.

(51) Int. Cl. C12N 15/113; A61K 31/712; A61K 31/7125; A61K 45/06; C12Q 1/6886

(52) U.S. Cl. CPC C12N 15/1138; A61K 31/712; A61K 31/7125; A61K 45/06; C12N 15/1137; C12Q 1/6886; C12N 2310/11; C12N 2310/14; C12N 2310/315; C12N 2310/321; C12N 2310/3231; C12N 2310/341; C12Q 2600/106; C12Q 2600/118; C12Y 207/12001

(57) ABSTRACT

Disclosed herein are modulators of a long non-coding RNA (lncRNA), wherein an expression of the lncRNA is associated with an activation of a cancer-associated fibroblast (CAF). Further provided herein are methods of inhibiting a growth of a solid tumor or facilitating access to a solid tumor in a subject in need thereof.

### CROSS REFERENCE

[0001] This application is continuation of PCT Application No. PCT/IB2024/000333, filed Jun. 21, 2024, which claims the benefit of U.S. Provisional Application No. 63/523,001, filed Jun. 23, 2023, U.S. Provisional Application No. 63/587,332, filed Oct. 2, 2023, and U.S. Provisional Application No. 63/651,270, filed May 23, 2024, each of which are incorporated herein by reference in their entireties.

### SEQUENCE LISTING

[0002] The instant application contains a Sequence Listing which has been submitted electronically in XML format and is hereby incorporated by reference in its entirety. Said XML copy, created on Sep. 3, 2024, is named 60448-705_601_SL.xml and is 2,090,611 bytes in size.

### BACKGROUND

[0003] Only a small portion of mammalian genome is transcribed to protein-coding mRNAs, with the rest is transcribed to non-coding RNAs. Among them, long non-coding RNAs (lncRNA) are a type of RNA with usually more than 200 nucleotides that are not translated into protein. LncRNAs have been shown to regulate gene expression networks at different levels via various mechanisms (see, e.g., Yao et al., Nature Cell Biology, 21, pages 542-551, 2019).

[0004] Cancer-associated fibroblasts (CAFs) are a group of activated fibroblasts. Fibroblasts may change to CAFs depending on their microenvironment. Furthermore, CAFs are highly heterogeneous and display plasticity in the tumor microenvironment. CAFs are involved in well characterized pro-tumorigenic functions, such as participating in the growth and invasion of tumor cells, that contribute to the development of various cancers. They can secrete various factors to regulate tumor development, metastasis, and therapeutic resistance.

[0005] Due to their involvement in tumor-promoting functions, CAFs may be important targets for cancer therapy; however, there are no fundamental CAF-targeting therapies. Therefore, there exist a need to develop CAF-targeting therapies that directly or indirectly modulate the development of CAF and/or activity of CAF in the tumor microenvironment. Such CAF-targeting therapies may be beneficial to prevent, alleviate, and treat solid cancers.

### INCORPORATION BY REFERENCE

[0006] All publications, patents, and patent applications mentioned in this specification are herein incorporated by reference to the same extent as if each individual publication, patent, or patent application was specifically and individually indicated to be incorporated by reference. To the extent publications and patents or patent applications incorporated by reference contradict the disclosure contained in the specification, the specification is intended to supersede and/or take precedence over any such contradictory material.

### SUMMARY OF THE DISCLOSURE

[0007] The present disclosure provides the identification of exemplary long non-coding RNAs (lncRNAs) that are upregulated in cancer-associated fibroblast (CAF) and provides compositions and methods of inhibiting a growth of a solid tumor or facilitating access to a solid tumor in a subject in need thereof by modulating (e.g., activating, suppressing, or supplementing) the expression of activity of the lncRNAs.

[0008] Provided herein is a modulator of a long non-coding RNA (lncRNA), wherein an expression or activity of the lncRNA is associated with an activation of a cancer-associated fibroblast (CAF).

[0009] In some instances, the expression or activity of the lncRNA is upregulated in the CAF compared to fibroblast not associated with cancer.

[0010] In some instances, the expression or activity of the lncRNA is not upregulated in a cell that is not associated with cancer.

[0011] In some instances, the CAF is associated with collagen-fibril organization, extracellular matrix (ECM) organization, and/or tissue development in tumor microenvironment. In some instances, the CAF exhibits a higher expression of an ECM-modulatory gene when compared to a fibroblast that is not associated with cancer. In some instances, the ECM-modulatory gene is selected from the group consisting of C1QTNF3, COL5A2, ITGA11, PDPN, POSTN, ACTA2, ACTN1, ADAM12, ADAMTS12, AEBP1, ALDH18A1, ANTXR1, ARF4, ARL4C, BACE2, BASP1, BGN, BHLHE40, BMP1, BST2, C11orf24, C1orf198, C1QTNF6, CADM1, CALD1, CALU, CCND1, CD276, CDC42EP3, CERCAM, CHN1, CHPF, CKAP4, CLEC11A, CLIC4, CNN2, COL10A1, COL11A1, COL12A1, COL1A1, COL1A2, COL5A1, COL8A1, COLGALT1, CREB3L1, CSRP2, CTHRC1, CTSB, CTSK, CTSZ, CXCL2, CXCL3, DAP, DIO2, DPYSL3, DUSP10, EDIL3, EDNRA, EFEMP2, EGFL6, ERN1, FAP, FBXO32, FKBP10, FN1, FSCN1, FZD1, GAPDH, GEM, GGT5, GJA1, GLT8D2, GOLM1, GPX7, GPX8, GREM1, HAPLN3, HCFC1R1, HES4, HLA-B, HLA-C, HS3ST3A1, ID1, ID4, IER3, IFI27, IFI6, IL32, INHBA, ITGB5, ITPRIP, KDELR2, KDELR3, KIAA1217, KIF26B, KLF6, LAMP5, LEF1, LMCD1, LMO7, LOXL2, LRRC15, LUM, MAGED1, MARCKSL1, MARVELD1, MDK, MICAL2, MIF, MMP11, MMP14, MMP19, MMP2, MSRB3, MXRA5, MYH9, MYL9, NEK6, NR4A2, NREP, NRP2, NTM, NXN, OLFML2B, P3H1, P3H4, P4HA3, P4HB, PALLD, PARVA, PDGFC, PDLIM7, PEA15, PERP, PKM, PLOD1, PLOD2, PMAIP1, PMEPA1, PODNL1, POSTN, PRDX4, PRSS23, PTGER3, PTK7, PYCR1, RAB31, RAI14, RBM3, RCAN2, RCN1, RCN3, RGCC, RGS3, RIN2, RNF144A, ROR2, RUNX2, SCARF2, SDC1, SEC13, SERPINHI, SFRP2, SHISA5, SLC16A3, SLC38A5, SLC39A14, SMCO4, SMIM3, SMYD3, SNAI2, SPARC, SPATS2L, SPHK1, SPON1, SSR3, STK17B, SUGCT, SULF1, SULF2, SYTL2, TAGLN, TENM3, TGFB1I1, TGFB1, THBS2, THY1, TMEM119, TMEM263, TMEM45A, TNFAIP3, TOM1, TPM1, TPM4, TPST2, TSPO, TUBA1C, TUSC3, UBTD1, UNC5B, VCAN, VGLL4, and VOPPl.

[0012] In some instances, one or more enhancers are within a genomic locus encoding the lncRNA, wherein the one or more enhancers are associated with the CAF. In some instances, the one or more enhancers are marked by H3K27ac.

[0013] In some instances, one or more protein-coding genes are at most 100, 200, 300, 400, or 500 nucleotides upstream or downstream of or within the genomic locus encoding the lncRNA, wherein the one or more protein-coding genes are associated with the CAF. In some instances, the one or more protein-coding genes are associated with a pro-tumorigenic or fibrosis development function of the CAF. In some instances, the one or more protein-coding genes are selected from the group consisting of LRRC15, COL12A1, DYRK2, FN1, and CAPN9.

[0014] In some instances, the lncRNA comprises XLOC_055514, XLOC_055515, XLOC_069921, XLOC_005184, ENSG00000203585, SHARED_00113753, as listed in Table 10, any one of lncRNAs listed in Table 12, or a fragment thereof. In some instances, the lncRNA comprises XLOC_055514, XLOC_055515, XLOC_069921, XLOC_005184, ENSG00000203585, SHARED_00113753, ENSG00000288903, ENSG00000230838 (LINC01614), ENSG00000244137 as listed in Table 10, or a fragment thereof.

[0015] In some instances, the modulator comprises an endonuclease complex guided by a nucleic acid, wherein the nucleic acid targets the lncRNA or a genomic locus thereof. In some instances, the modulator is a CRISPR-directed DNA editing complex. In some instances, the modulator is an ASO-directed RNA editing complex.

[0016] In some instances, the modulator comprises a nucleic acid molecule that hybridizes to the lncRNA. In some instances, the nucleic acid molecule is a small interfering RNA (siRNA), a microRNA (miRNA), an inhibitory double stranded RNA (dsRNA), a small or short hairpin RNA (shRNA), an antisense oligonucleotide (ASO), a piwi-interacting RNA (piRNA), a heterogeneous nuclear RNA (hnRNA), a small nuclear RNA (snRNA), or an enzymatically-prepared siRNA (esiRNA) or the precursors thereof.

[0017] In some instances, the nucleic acid molecule is an ASO. In some instances, the ASO is a gapmer or a mixmer. In some instances, the ASO is about 13-30 nucleotides long. In some instances, the ASO is about 14-18 nucleotides long.

[0018] In some instances, the nucleic acid molecule comprises at least 10, 11, 12, or 13 consecutive nucleotides with no more than 1, 2, or 3 mismatches from one of SEQ ID NOs: 1-40. In some instances, the nucleic acid molecule comprises a nucleic acid sequence that is at least 80%, at least 85%, at least 90%, at least 95% identical to a sequence selected from one of SEQ ID NOs: 1-40.

[0019] In some instances, the ASO is a gapmer comprising a central region of consecutive DNA nucleotides flanked by a 5′-wing region and 3′-wing region, wherein at least one of 5′-wing region and 3′-wing region comprises a nucleic acid analogue, wherein the nucleic acid analogue comprises one or more ribose modifications, one or more backbone modifications, one or more nucleobase modifications, or a combination thereof.

[0020] In some instances, the nucleic acid analogue comprises a 2′-methoxyethyl (2′-MOE) RNA.

[0021] In some instances, the nucleic acid analogue comprises a locked nucleic acid (LNA). In some instances, the LNA comprises a beta-D-oxy LNA, an alpha-L-oxy-LNA, a beta-D-amino-LNA, an alpha-L-amino-LNA, a beta-D-thio-LNA, an alpha-L-thio-LNA, a 5′-methyl-LNA, a beta-D-ENA, or an alpha-L-ENA. In some instances, the LNA comprises a beta-D-oxy LNA. In some instances, the 5′-wing region comprises at least two LNAs. In some instances, the 5′-wing region comprises three consecutive LNAs. In some instances, the 3′-wing region comprises at least one LNA. In some instances, the 3′-wing region comprises two consecutive LNAs.

[0022] In some instances, the nucleic acid molecule comprises one or more phosphorothioate internucleotide linkages. In some instances, each internucleotide linkage in the nucleic acid molecule is a phosphorothioate backbone.

[0023] Provided herein is a modulator comprising an antisense oligonucleotide (ASO), wherein the ASO comprises at least 10, 11, 12, or 13 consecutive nucleotides with no more than 1, 2, or 3 mismatches from SEQ ID NO: 2, 4, 5, 9-11, 15, 16, 18, 19, 24-26, 34 or 38-40.

[0024] In some instances, the ASO comprises a nucleic acid sequence of 80%, at least 85%, at least 90%, at least 95% identical to SEQ ID NO: 2, 4, 5, 9-11, 15, 16, 18, 19, 24-26, 34 or 38-40.

[0025] Further provided herein is a pharmaceutical composition comprising the modulator described herein and a pharmaceutically acceptable salt or derivative thereof.

[0026] Further provided herein is a kit comprising the modulator described herein or the pharmaceutical composition described herein.

[0027] Further provided herein is a method of inhibiting a growth of a solid tumor or facilitating access to a solid tumor in a subject in need thereof, the method comprising administering to the subject an effective amount of the modulator described herein, or the pharmaceutical composition described herein.

[0028] In some instances, the modulator described herein, or the pharmaceutical composition described herein reduces expression or activity of genes involved in ECM structure organization and/or regulation of GTPase activity. In some instances, the modulator described herein, or the pharmaceutical composition described herein reduces expression or activity of genes involved in regulation of tumor innervation in a tumor microenvironment. In some instances, the modulator described herein, or the pharmaceutical composition described herein reduces an expression or activity of one or more genes shown in Table 1, Table 13, or Table 14. In some instances, the modulator described herein, or the pharmaceutical composition described herein reduces an expression or activity of an ECM-modulatory gene in the CAF. In some instances, the ECM-modulatory gene or the genes involved in ECM structure organization and/or regulation of GTPase activity and/or regulation of tumor innervation in a tumor microenvironment is selected from the group consisting of LRRC15, MMP11, COL11A1, C1QTNF3, CTHRC1, COL12A1, COL10A1, COL5A2, THBS2, AEBP1, ITGA11, PDPN, and FAP.

[0029] In some instances, the modulator described herein is encoded by a transgene in an expression vector.

[0030] In some instances, the modulator described herein is encapsulated in a liposome or coupled with a nanoparticle.

[0031] In some instances, the modulator described herein is administered in combination with an anti-tumor drug.

[0032] Further provided herein is a method of diagnosing or monitoring a cancer in a subject, the method comprising: (a) obtaining a sample from the subject; (b) detecting an expression and/or an activity of a biomarker from the sample, wherein the biomarker comprises an lncRNA comprising a nucleic acid sequence listed in Table 11 or a fragment thereof, or transcribed from a genomic region or a subset thereof listed in Table 10 or Table 12; and (c) diagnosing or monitoring the cancer prognosis based on the expression and/or the activity of the biomarker. In some instances, the biomarker further comprises INHBA, COL11A1, MMP13, NNMT, LOXL3, PLOD2, TNC, ITGA11, COL5A1, COMP, COL1A1, FN1, LTBP2, COL10A1, NOX4, POSTN, CCN2, LRRC15, DCN, LUM, COL1A2, COL3A1, COL6A2, MMP11, COL11A1, C1QTNF3, CTHRC1, COL12A1, COL10A1, COL5A2, THBS2, AEBP1, ITGA11, PDPN, FAP, COL8A1, or a gene from Table 1, Table 13, or Table 14. In some instances, the method further comprises (d) administering the subject the modulator disclosed herein, or the pharmaceutical composition disclosed herein. In some instances, the cancer is a solid tumor. In some instances, the solid tumor is breast cancer, colorectum cancer, lung cancer, prostate cancer, bladder cancer, head and neck cancer (e.g., head and neck squamous cell carcinoma), skin cancer (e.g., skin melanoma), pancreatic cancer (e.g., pancreatic ductal adenocarcinoma), liver cancer, esophageal cancer, brain cancer, stomach cancer (e.g., stomach adenocarcinoma), gallbladder cancer, ovarian cancer, colon adenocarcinoma, or sarcoma.

[0033] Further provided herein is a method of predicting severity and progression of a cancer in a subject, the method comprising: (a) obtaining a sample from the subject; (b) detecting an expression and/or an activity of a biomarker from the sample, wherein the biomarker comprises an lncRNA comprising a nucleic acid sequence listed in Table 11 or a fragment thereof, or transcribed from a genomic region or a subset thereof listed in Table 10 or Table 12; and (c) diagnosing the subject to have a more severe or a progression of the cancer if the expression and/or the activity of the biomarker is at least 50%, at least 60%, at least 70%, at least 80%, or at least 90% higher when compared to a control. In some instances, the biomarker further comprises INHBA, COL11A1, MMP13, NNMT, LOXL3, PLOD2, TNC, ITGA11, COL5A1, COMP, COL1A1, FN1, LTBP2, COL10A1, NOX4, POSTN, CCN2, LRRC15, DCN, LUM, COL1A2, COL3A1, COL6A2, MMP11, COL11A1, C1QTNF3, CTHRC1, COL12A1, COL10A1, COL5A2, THBS2, AEBP1, ITGA11, PDPN, FAP, COL8A1, or a gene from Table 1, Table 13, or Table 14. In some instances, the method further comprises (d) administering the subject the modulator disclosed herein, or the pharmaceutical composition disclosed herein. In some instances, the cancer is a solid tumor. In some instances, the solid tumor is breast cancer, colorectum cancer, lung cancer, prostate cancer, bladder cancer, head and neck cancer (e.g., head and neck squamous cell carcinoma), skin cancer (e.g., skin melanoma), pancreatic cancer (e.g., pancreatic ductal adenocarcinoma), liver cancer, esophageal cancer, brain cancer, stomach cancer (e.g., stomach adenocarcinoma), gallbladder cancer, ovarian cancer, colon adenocarcinoma, or sarcoma.

[0034] Further provided herein is a method of monitoring an efficacy or therapeutic resistance of a therapy treating a cancer in a subject, the method comprising: (a) obtaining a sample from the subject; (b) detecting an expression and/or an activity of a biomarker from the sample, wherein the biomarker comprises an lncRNA comprising a nucleic acid sequence listed in Table 11 or a fragment thereof, or transcribed from a genomic region or a subset thereof listed in Table 10 or Table 12; and (c) concluding the therapy treating the cancer is effective or is less likely to develop therapeutic resistance if the expression and/or the activity of the biomarker is at least 50%, at least 60%, at least 70%, at least 80%, at least 90% reduced by the therapy. In some instances, the biomarker further comprises INHBA, COL11A1, MMP13, NNMT, LOXL3, PLOD2, TNC, ITGA11, COL5A1, COMP, COL1A1, FN1, LTBP2, COL10A1, NOX4, POSTN, CCN2, LRRC15, DCN, LUM, COL1A2, COL3A1, COL6A2, MMP11, COL11A1, C1QTNF3, CTHRC1, COL12A1, COL10A1, COL5A2, THBS2, AEBP1, ITGA11, PDPN, FAP, COL8A1, or a gene from Table 1, Table 13, or Table 14. In some instances, the method further comprises (d) administering the subject the modulator disclosed herein, or the pharmaceutical composition disclosed herein. In some instances, the cancer is a solid tumor. In some instances, the solid tumor is breast cancer, colorectum cancer, lung cancer, prostate cancer, bladder cancer, head and neck cancer (e.g., head and neck squamous cell carcinoma), skin cancer (e.g., skin melanoma), pancreatic cancer (e.g., pancreatic ductal adenocarcinoma), liver cancer, esophageal cancer, brain cancer, stomach cancer (e.g., stomach adenocarcinoma), gallbladder cancer, ovarian cancer, colon adenocarcinoma, or sarcoma.

### BRIEF DESCRIPTION OF THE DRAWINGS

[0035] The novel features of the disclosure are set forth with particularity in the appended claims. A better understanding of the features and advantages of the present disclosure will be obtained by reference to the following detailed description that sets forth illustrative instances, in which the principles of the disclosure are utilized, and the accompanying drawings (also “Figure” and “FIG.” herein), of which:

[0036] FIGS. 1A-1F illustrate cluster analysis of target lncRNA candidates in primary human Head & Neck Squamous Cell Carcinoma (HNSCC) tumor samples. FIG. 1A shows expression of candidate target lncRNAs in HNSCC tumor fibroblast (FB) sub-clusters. Stromal Enhancer Associated lncRNAs (SEALs; SEAL1-SEAL7) are expressed in FBs, whereof SEAL1, SEAL3, SEAL5 and SEAL6 are expressed in fibroblast cluster 2, representing myofibroblast Cancer Associated Fibroblast (myCAF). FIG. 1B shows differential expression analysis of SEALs in The Cancer Genome Atlas (TCGA)-HNSCC tumor tissue versus normal tissue, and in tumor tissue fibroblasts versus normal tissue fibroblasts. FIG. 1C shows expression of SEALs across normal human in vitro and in vivo tissues and cells with Encyclopedia of DNA Elements (ENCODE)/Genotype-Tissue Expression (GTEx) database. FIG. 1D is a heat map showing expression of differentially upregulated candidate lncRNAs in the fibroblast cluster 2, representing myofibroblast Cancer Associated Fibroblast (myCAF). FIG. 1Ei-1Eiv shows dot graphs of expression of differentially upregulated candidate lncRNAs across normal human in vitro and in vivo tissues and cells with Encyclopedia of DNA Elements (ENCODE)/Genotype-Tissue Expression (GTEx) databases. FIG. 1F shows dot graphs of expression of lncRNAs associated with the myCAF signature across normal human in vitro and in vivo tissues and cells with Encyclopedia of DNA Elements (ENCODE)/Genotype-Tissue Expression (GTEx) databases.

[0037] FIGS. 2A-2O illustrate the generation and characterization of an in vitro induced Cancer Associated Fibroblast (CAF). FIG. 2A shows the experimental scheme of generating the in vitro induced CAF by treating Human Dermal Fibroblasts (HDFs) with TGFβ or TGFβ+ starvation (COMB). FIG. 2B shows microscopic images of HDFs upon TGFβ or COMB induction versus no induction (control), at 12 hours, 24 hours and 48 hours. FIG. 2C shows upregulation of myofibroblast CAF (myCAF) markers upon TGFβ or COMB induction by RNA-seq analysis. FIG. 2D shows expression of myofibroblast CAF markers upon TGFβ induction by qPCR analysis. FIG. 2E shows expression of myofibroblast CAF markers upon COMB induction by qPCR analysis. FIG. 2F shows expression of SEAL1 in control HDFs, and induced CAFs by COMB or TGFβ by RNA-seq analysis. FIG. 2G shows expression of SEAL2 in control HDFs, and induced CAFs by COMB or TGFβ by RNA-seq analysis. FIG. 2H shows expression of SEAL3 in control HDFs, and induced CAFs by COMB or TGFβ by RNA-seq analysis. FIG. 2I shows expression of SEAL4 in control HDFs, and induced CAFs by COMB or TGFβ by RNA-seq analysis. FIG. 2J shows expression of SEAL5 in control HDFs, and induced CAFs by COMB or TGFβ by RNA-seq analysis. FIG. 2K shows expression of SEAL6 in control HDFs, and induced CAFs by COMB or TGFβ by RNA-seq analysis. FIG. 2L shows expression of SEAL7 in control HDFs, and induced CAFs by COMB or TGFβ by RNA-seq analysis. FIG. 2M shows a heat map of differentially upregulated myofibroblast CAF markers upon TGFβ induction by RNA-seq analysis. FIG. 2N shows upregulation of myofibroblast CAF markers upon TGFβ induction by qPCR analysis. FIG. 2O shows SingScore analysis of a defined myCAF signature upon TGFβ induction by RNA-seq analysis.

[0038] FIGS. 3A-3F illustrate characterization of SEAL1 and antisense oligonucleotides (ASOs) targeting SEAL1. FIG. 3A shows genomic locus encoding SEAL1 transcript and LRRC15 mRNA, and SEAL1 upregulation in the TGFβ induced CAF. FIG. 3B shows genomic location where SEAL1-specific tagged primers and LRRC15-specific tagged primers are hybridized. FIG. 3C shows qPCR amplification using LRRC15-specific tagged primers and SEAL1-specific tagged primers with control versus TGFβ induced CAF. FIG. 3D shows qPCR validation of SEAL1 expression in TGFβ induction CAF model versus control. FIG. 3E shows expression of SEAL1, myCAF markers, and LRRC15 markers in TGFβ induced CAF versus control. FIG. 3F shows genomic locations targeted by 7 different designs of SEAL1 ASOs.

[0039] FIGS. 4A-4I illustrate qPCR analysis for expression of SEAL1 and myCAF markers upon transfecting TGFβ induced CAFs with SEAL1 ASOs or scramble ASO control (Scrl).

[0040] FIGS. 4J-4K illustrate analysis of LRRC15 protein upon transfecting TGFβ induced CAFs with SEAL1 ASO, scramble ASO control (Scrl) or LRRC15 ASO. FIG. 4J shows western blot of LRRC15 protein levels across different conditions. FIG. 4K shows the quantification of FIG. 4J.

[0041] FIG. 5 shows microscopic images of TGFβ induced CAFs transfected with SEAL1 ASO (SEAL1_G2, SEAL1_G4, or SEAL1_G5) or scramble control ASO (scrl ASO).

[0042] FIGS. 6A-6I illustrate qPCR analysis for expression of SEAL1 and myCAF markers upon transfecting TGFβ induced CAFs with SEAL1_G4 ASO, SEAL1_G5 ASO, or Scrl.

[0043] FIG. 6J shows RNA-seq analysis of SEAL1 transcript upon transfecting TGFβ induced CAFs with SEAL1_G4 ASO, SEAL1_G5 ASO, or Scrl. FIG. 6K shows SingScore of myCAF gene signature upon transfecting TGFβ induced CAFs with SEAL1_G4 ASO, SEAL1_G5 ASO, or Scrl.

[0044] FIG. 7A shows genomic locations targeted by 7 different designs of LRRC15 ASOs. FIGS. 7B-7J illustrate qPCR analysis for expression of SEAL1 and myCAF markers upon transfecting TGFβ induced CAFs with LRRC15 ASOs. FIG. 7K-7Q illustrate qPCR analysis for expression of myCAF markers upon transfecting TGFβ induced CAFs with SEAL1_G4 ASO, SEAL1_G5 ASO, LRRC15_G1 ASO, LRRC15_G3 ASO, or Scrl.

[0045] FIG. 8 shows microscopic images of TGFβ induced CAFs transfected with LRRC15 ASO (LRRC15_G1, LRRC15_G2, or LRRC15_G3) or scramble control ASO (scrl ASO).

[0046] FIG. 9A-9S illustrates the analysis of SEAL1 and LRRC15 in HNSCC FB and TGFβ induced CAFs. FIG. 9A shows RNA-seq analysis of LRRC15 mRNA upon transfecting TGFβ induced CAFs with LRRC15_GI ASO, LRRC15_G3 ASO, or Scrl. FIG. 9B shows SingScore analysis of a defined myCAF signature upon transfecting TGFβ induced CAFs with SEAL1_G4 ASO, SEAL1_G5 ASO, LRRC15_G1 ASO, LRRC15_G3 ASO, or Scrl. FIG. 9C shows single nuclei RNA-seq (snRNA-seq) analysis of SEAL1 and LRRC15 transcripts, as well as SingScore analysis of a defined myCAF signature and pseudobulk quantification of the myCAF signature upon transfecting TGFβ induced CAFs with SEAL1_G4 ASO, LRRC15_G3 ASO, or Scrl. FIG. 9D illustrates the analysis of SEAL1 and mRNA LRRC15 expression in HNSCC FBs of cancer progression stages from HNSCC scRNA-seq data. FIG. 9E shows RNA-seq analysis of the SEAL1 transcript expression upon transfecting TGFβ induced CAFs with the SEAL1_G4 ASO at different doses (0, 0.5, 1, 5, 10 and 25 nM). FIG. 10F shows RNA-seq analysis of the LRRC15 (top, left), FAP (top, right), CTHRC1 (bottom, left) and POSTN (bottom, right) transcripts expression upon transfecting TGFβ induced CAFs with the SEAL1_G4 ASO at different doses (0, 0.5, 1, 5, 10 and 25 nM). FIG. 9G shows Singscore analysis of an in-house defined myCAF signature (Table 13) upon transfecting TGFβ induced CAFs with the SEAL1_G4 ASO at different doses (0, 0.5, 1, 5, 10 and 25 nM). FIG. 10H shows RNA-seq analysis of the LRRC15 transcript expression upon transfecting TGFβ induced CAFs with the LRRC15_G3 ASO at different doses (0, 0.5, 1, 5, 10 and 25 nM). FIG. 9I shows RNA-seq analysis of the SEAL1 (top, left), FAP (top, right), CTHRC1 (bottom, left) and POSTN (bottom, right) transcripts expression upon transfecting TGFβ induced CAFs with the LRRC15_G3 ASO at different doses (0, 0.5, 1, 5, 10 and 25 nM). FIG. 9J shows Singscore analysis of an in-house defined myCAF signature (Table 13) upon transfecting TGFβ induced CAFs with the LRRC15_G3 ASO at different doses (0, 0.5, 1, 5, 10 and 25 nM). FIG. 9K shows identification of the SEAL1 Target Engagement panel (SEAL1 TEP) genes. Left: RNA-seq dose response cluster analysis upon transfecting TGFβ induced CAFs with the SEAL1_G4 ASO at different doses (0, 0.5, 1, 5, 10 and 25 nM). Right: Singscore analysis of the most responsive gene cluster (n=526), called SEAL1 TEP (Table 14), upon transfecting TGFβ induced CAFs with the SEAL1_G4 ASO at different doses (0, 0.5, 1, 5, 10 and 25 nM). FIG. 9L shows the fibroblast sub-clusters (top left), the SEAL1 expression in primary cancer fibroblasts (top middle) and Singscore analysis of the SEAL1 TEP in all fibroblasts (top right), of a HNSCC scRNA-seq dataset. Bottom figure panel shows Singscore analysis of a SEAL1 co-expression module (hSEAL1 module, n=177), defined from HNSCC primary cells unbiased co-expression network analysis, in HNSCC normal tissue FBs (left) vs primary cancer FBs (right, also shown in the right subfigure of FIG. 9M). FIG. 9M (left) shows Singscore analysis of the SEAL1 module (n=177) upon transfection of TGFβ induced CAFs with control Scrl, SEAL1_G4 and LRRC15_G3 ASOs. FIG. 9M (right) also shows Singscore analysis of the SEAL1 module (n=177) in HNSCC primary cancer FBs. FIG. 9N shows RNA-seq analysis of the LRRC15 transcript expression upon transfecting non-TGFβ induced (control) dCAS9-iHDF cells with non-targeting sgRNA and non-targeting Scrl ASO, or upon transfecting TGFβ-induced dCAS9-iHDF cells with either non-targeting sgRNA plus Scrl ASO (TGFβ control) or with LRRC15-targeting sgRNA plus Scrl ASO (LRRC15 depletion only). FIG. 9O shows RNA-seq analysis of the COL11A1, CTHRC1, COL5A2 and ITGA11 transcripts expression upon transfecting non-TGFβ induced (control) dCAS9-iHDF cells with non-targeting sgRNA and non-targeting Scrl ASO, or upon transfecting TGFβ-induced dCAS9-iHDF cells with either non-targeting sgRNA plus Scrl ASO (TGFβ control), with LRRC15-targeting sgRNA plus Scrl ASO (LRRC15 depletion only), with non-targeting sgRNA plus SEAL1_G4 ASO (SEAL1 depletion only) or with LRRC15-targeting sgRNA plus SEAL1_G4 ASO (depletion of both LRRC15 and SEAL1). FIG. 9P shows RNA-seq Singscore analysis of the myCAF signature upon transfecting non-TGFβ induced (control) dCAS9-iHDF cells with non-targeting sgRNA and non-targeting Scrl ASO, or upon transfecting TGFβ-induced dCAS9-iHDF cells with either non-targeting sgRNA plus Scrl ASO (TGFβ control), with LRRC15-targeting sgRNA plus Scrl ASO (LRRC15 depletion only), with non-targeting sgRNA plus SEAL1_G4 ASO (SEAL1 depletion only) or with LRRC15-targeting sgRNA plus SEAL1_G4 ASO (depletion of both LRRC15 and SEAL1). FIG. 9Q shows western blot analysis of the LRRC15 protein in control dCAS9-iHDF cells, or in TGFβ-induced dCAS9-iHDF cells transfected with non-targeting Scrl ASO, with LRRC15-targeting sgRNA plus Scrl ASO (LRRC15 depletion only, LRRC15 CRISPRi+Scrl), with non-targeting sgRNA plus SEAL1_G4 ASO (SEAL1 depletion only, hSEA1_4) or with LRRC15-targeting sgRNA plus SEAL1_G4 ASO (depletion of both LRRC15 and SEAL1, LRRC15 CRISPRi+hSEA1_4). FIG. 9R shows RNA-seq analysis of the SEAL1 transcript expression or LRRC15+ myofibroblast marker signature score upon transfecting non-TGFβ induced (control) dCAS9-iHDF cells with non-targeting sgRNA and non-targeting Scrl ASO, or upon transfecting TGFβ-induced dCAS9-iHDF cells with either non-targeting sgRNA plus Scrl ASO (TGFβ control), with LRRC15-targeting sgRNA plus Scrl ASO (LRRC15 depletion only), with non-targeting sgRNA plus SEAL1_G4 ASO (SEAL1 depletion only) or with LRRC15-targeting sgRNA plus SEAL1_G4 ASO (depletion of both LRRC15 and SEAL1). FIG. 9S shows RNA-seq analysis of the TNC (left), FAP (top, right), COL5A1 (middle) and LTBP2 (right) transcripts expression upon transfecting TGFβ induced CAFs with the SEAL1_G4 ASO at different doses.

[0047] FIGS. 10A-10F illustrate characterization of SEAL2 and ASOs targeting SEAL2. FIG. 10A shows genomic locus encoding SEAL2 transcript and COL12A1 mRNA, and SEAL2 upregulation in the COMB induced CAF. FIG. 10B shows genomic locus encoding CAF super enhancer (SE) region and COL12A1 mRNA and its upregulation in the COMB induced CAF. FIG. 10C shows genomic location where SEAL2-specific primers are hybridized. FIG. 10D shows qPCR validation of SEAL2 expression in COMB induced CAF versus control. FIG. 10E shows expression of SEAL2 and myCAF markers in COMB induced CAF versus control. FIG. 10F shows genomic locations targeted by 8 different designs of SEAL2 ASOs.

[0048] FIGS. 11A-11I illustrate qPCR analysis for expression of SEAL2 and myCAF markers upon transfecting COMB induced CAFs with SEAL2 ASOs or Scrl.

[0049] FIG. 12 shows microscopic images of COMB induced CAFs transfected with SEAL2 ASO (SEAL2_G4, SEAL2_G5, SEAL2_G7, or SEAL2_G8) or scramble control ASO (scrl ASO).

[0050] FIGS. 13A-13I illustrate qPCR analysis for expression of SEAL2 and myCAF markers upon transfecting COMB induced CAFs with SEAL2_G4 ASO, SEAL2_G5 ASO, SEAL2_G8, or Scrl. FIG. 13J shows RNA-seq analysis of SEAL2 transcript upon transfecting COMB induced CAFs with SEAL2_G4 ASO, SEAL2_G8 ASO, or Scrl. FIG. 13K shows SingScore of myCAF gene signature upon transfecting COMB induced CAFs with SEAL2_G4 ASO, SEAL2_G8 ASO, or Scrl.

[0051] FIGS. 14A-14R illustrate SEAL3 identification and functions. FIGS. 14A-14C illustrate characterization of SEAL3 and ASOs targeting SEAL3. FIG. 14A shows genomic locus encoding SEAL3 transcript, and SEAL3 upregulation in the TGFβ and COMB induced CAF. FIG. 14B shows genomic location where SEAL3-specific primers are hybridized, and genomic locations targeted by 8 different designs of SEAL3 ASOs. FIG. 14C shows qPCR validation of SEAL3 expression in COMB induced CAF versus control. FIGS. 14D-14J illustrate qPCR analysis for expression of myCAF markers upon transfecting COMB induced CAFs with SEAL3_G1 ASO, SEAL3_G2 ASO, SEAL3_G3 ASO, SEAL3_G4 ASO, SEAL3_G5 ASO, SEAL3_G6 ASO, SEAL3_G7 ASO, SEAL3_G8 ASO or Scrl. FIG. 14K shows microscopic images of COMB induced CAFs transfected with SEAL3 ASO (SEAL3_G5, SEAL3_G6 or SEAL3_G7) or scramble control ASO (scrl ASO). FIGS. 14L-14R illustrate qPCR analysis for expression of myCAF markers upon transfecting COMB induced CAFs with SEAL3_G6 ASO, SEAL3_G7 ASO, or Scrl.

[0052] FIGS. 15A-15D illustrate SEAL4 identification and functions. FIGS. 15A-15D illustrate characterization of SEAL4 and ASOs targeting SEAL4. FIG. 15A shows genomic locus encoding SEAL4 transcript and DYRK2 mRNA, and SEAL4 upregulation in the TGFβ and COMB induced CAF. FIG. 15B shows genomic location where SEAL4-specific tagged primers are hybridized. FIG. 15C shows qPCR validation of SEAL4 expression using specific primers, specifically primer pairs 5 and 6 (PP5 and PP6). FIG. 15D shows genomic locations targeted by 6 different designs of SEAL4 ASOs.

[0053] FIGS. 15E-15J illustrate qPCR analysis for expression of SEAL4 and myCAF markers upon transfecting COMB induced CAFs with SEAL4_G1 ASO, SEAL4_G3 ASO, SEAL4_753_G1 ASO, SEAL4_753_G4 ASO, SEAL4_753_G5 ASO, SEAL4_753_G6 ASO, SEAL4_753_G7 ASO, or Scrl.

[0054] FIG. 15K shows microscopic images of COMB induced CAFs transfected with SEAL4 ASO (SEAL4_753_G1, SEAL4_753_G5, SEAL4_753_G6 or SEAL4_753_G7) or scramble control ASO (scrl ASO).

[0055] FIGS. 15L-15Q illustrate qPCR analysis for expression of SEAL4 and myCAF markers upon transfecting COMB induced CAFs with SEAL4_753_G6 ASO, SEAL4_753_G7 ASO, or Scrl.

[0056] FIGS. 16A-16C illustrate characterization of SEAL9 and ASOs targeting SEAL9. FIG. 16A shows genomic locus encoding SEAL9 transcript. FIG. 16B shows genomic location where SEAL9-specific primers are hybridized and qPCR validation of SEAL9 upregulation in the TGFβ induced CAFs vs CTRL. FIG. 16C shows genomic locations targeted by 3 different SEAL9 ASOs.

[0057] FIGS. 17A-17H illustrate qPCR analysis for expression of SEAL9 and myCAF markers upon transfecting TGFβ induced CAFs with SEAL9_G1 ASO, SEAL9_G2 ASO, SEAL9_G3 ASO, or Scrl.

[0058] FIG. 18 shows microscopic images of TGFβ induced CAFs transfected with SEAL9 ASO (SEAL9_G1, SEAL9_G2, SEAL9_G3) or scramble control ASO (scrl ASO).

[0059] FIG. 19 shows analysis of SEAL2, SEAL3 and SEAL4 lncRNA transcripts expression in HNSCC FBs of cancer progression stages from human patient HNSCC scRNA-seq data.

[0060] FIGS. 20A-20I illustrate the mouse Seal1 identification and functions, and analysis of ASOs designed to target mouse Seal1 (mSeal1_1-mSeal1_6) or mouse Lrrc15 (mLrrc15_1-mLrrc15_3). FIG. 20A shows the mouse genomic locus encoding mSeal1 transcript and mLrrc15 mRNA, the expression of mSeal1 and mLrrc15 in immortalized mouse dermal fibroblasts (iMDFs) and TGFβ induced iMDFs by RNA-seq data, and location of >90%, >70% or >50% conserved regions between human SEAL1 and mouse mSeal1. FIG. 20B shows a drawing of the iMDF in vitro model (left) and the upregulation, as compared to control (CTRL), of mSeal1 and mLrrc15 in TGFβ induced iMDFs by RNA-seq analysis (right). FIG. 20C shows the mouse genomic locus encoding mSeal1 transcript and mLrrc15 mRNA, and the location of exemplary ASOs designed to target mSeal1 (mSeal1_1-mSeal1_6) or mLrrc15 (mLrrc15_1-mLrrc15_3).

[0061] FIG. 20D shows images of iMDFs (top), and iMDFs 48h after TGFβ induction and transfection with mSeal1_G5, mSeal1_G6 or mLrrc15_G3 ASOs (middle and bottom). FIG. 20E shows a diagram of the iMDF in vitro model (left) and RNA-seq analysis of the mSeal1 or mLrrc15 transcripts expression upon transfecting TGFβ induced iMDFs with the mSeal1_G6 (mSeal1_6), mLrrc15_G3 (mLrrc15_3) or control Scrl ASOs. FIG. 20F shows Singscore analysis of the mouse orthologous myCAF signature (Table 13) (left) or the mouse orthologous SEAL1 TEP signature (Table 14) (right) upon transfecting TGFβ induced iMDFs with the mSeal1_G6 (mSeal1_6), mLrrc15_G3 (mLrrc15_3) or control Scrl ASOs. FIG. 20G shows a description of a pancreatic ductal adenocarcinoma (PDAC) mouse model involving the implantation of mouse PDAC tumor cells into DTR− or DTR+ genotype mice. DTR− genotype mice have a wild-type (wt) mSeal1/mLrrc15 genomic locus while DTR+ genotype mice have a heterogeneously modified (DTR-GFP cassette knock-in) mSeal1/mLrrc15 genomic locus, whereby both mSeal1 and mLrrc15 coding sequences are disrupted. In DTR+ genotype mice, diphtheria toxin (DT) is produced from the modified mSeal1/mLrrc15 genomic locus in cells where the mLrrc15 promoter is active, leading to these cells dying upon treating the DTR+ mice with DT. FIGS. 20H-20I shows scRNA-seq analysis of this mouse model. FIG. 20H shows fibroblast sub-clustering and the emergence of the different sub-clusters of fibroblasts with or without DTR at different timepoints (e.g., day 14, day 21). FIG. 20I shows expression of mSeal1 and mLrrc15 in the FBs of the dataset, with or without DTR at different timepoints (e.g., day 14, day 21).

[0062] FIG. 21A-21B show survival analysis of the TCGA-HNSC patient cohort (n=499). FIG. 21A shows a survival graph stratified based on myCAF fraction—High vs myCAF fraction—Low content. The myCAF fraction—High patient category had worse (p=0.0074) Overall Survival (OS) than the myCAF fraction—Low category, with a median survival of 2.5 years as compared to 4.5 years, respectively. FIG. 21B shows a survival graph stratified based on sub-clustering fibroblasts. The sub-cluster 1 myCAF fraction—High patient category had worse (p=0.02) Overall Survival (OS) than the sub-cluster 1 myCAF fraction—Low category.

[0063] FIGS. 22A-22B illustrate analysis of transcription factors (TFs) in CTRL vs TGF-β induced myCAFs, and the analysis of TF regulon expression in CTRL and TGF-β induced myCAFs with or without treatment with non-targeting (Scrl), SEAL1_G4 or LRRC15_G3 ASOs. FIG. 22A shows pseudotime plots of TEAD2, RUNX2, RUNX1, NFATC4 expression, activity, and positively associated TF regulon from HDFs to TGFβ induced CAFs. FIG. 22B shows Singscore analysis of the predicted target protein coding genes to the TFs TEAD2, NFATC4 and RUNX1 TFs in control HDFs vs TGF-β induced myCAFs treated with non-targeting (Scrl), SEAL1_G4 or LRRC15_G3 ASOs.

### DETAILED DESCRIPTION OF THE DISCLOSURE

[0064] Cancer-associated fibroblast (CAF), and particularly myofibroblast CAF (myCAF), plays a key role in tumor development. Compared to corresponding malignant cells within a certain tumor type, CAFs or myCAFs often display less interpatient heterogeneity across cancer types and patients, thus making them an ideal therapeutic target. However, the current CAF-directed therapeutics mainly target the protein-coding genes, and often suffer from a lack of target specificity. Therefore, there is an unmet need to develop more specific CAF-directed therapeutics.

[0065] Long non-coding RNAs (lncRNAs) are a special type of RNAs that are involved in all layers of transcriptional regulation covering a broad range of mechanisms. lncRNAs usually express in a cell type/cell state specific manner. However, the past research focused on lncRNAs expressed in malignant cells, rather than on lncRNAs expressed in CAF or myCAF. Therefore, it is an innovative therapeutic design to target lncRNAs expressed in CAF or myCAF.

[0066] With regards to novel lncRNA identification, previous studies were affected by several limitations. One of them was an absence of deep coverage RNA-seq data, which left a majority of lncRNAs to remain undetected as they may be expressed in low copy numbers. Another limitation was that the analysis of RNA-seq data lacking strand-specific read information hampers the detection of anti-sense lncRNAs that constitute a large portion of cancer-related lncRNAs. Therefore, the inventions disclosed herein present an unprecedented platform to identify novel lncRNAs that are specifically expressed in CAF or myCAF, and present a promising therapeutic target for cancer treatments.

[0067] In some aspects, provided herein are long noncoding transcripts that are associated with the development and/or activation of CAF, which can affect the state of the tumor microenvironment and development and prognosis of tumors (e.g., solid tumors). Such long noncoding transcripts could be a druggable target to prevent, alleviate, or treat development or prognosis of cancer, or symptoms of cancer. As such, in one aspect, provided herein, are modulators of a long noncoding transcript, pharmaceutical compositions comprising the modulator, and kits comprising the modulator. Also provided herein are methods of modulating expression or activity of a long noncoding transcript in a subject in need thereof using modulators of the long noncoding transcript. Further provided herein are methods of inhibiting a growth of a solid tumor or facilitating access to a solid tumor in a subject in need thereof using the modulators of a long noncoding transcript.

### Cancer-Associated Fibroblast (CAF)

[0068] Chronic fibrosis is one of the risk factors for cancer development. Fibrosis can lead to stiffened stroma or extracellular matrix, which enhances tumor cell growth, survival and migration. Development of tumor can further contribute to fibrosis and promote malignancy.

[0069] In some instances, cancer-associated fibroblast (CAF) plays pro-tumorigenic functions that contribute to the development of common and aggressive cancers as a mediator of tumor fibrosis (e.g., desmoplasia) in many cancers. Non-limiting examples of cancers affected by CAFs are breast cancer, colorectum cancer, lung cancer, prostate cancer, bladder cancer, head and neck cancer, skin cancer (e.g., skin melanoma), pancreatic cancer, liver cancer, esophageal cancer, brain cancer, stomach cancer, gallbladder cancer, or ovarian cancer.

[0070] CAFs can be derived from various cell types. In some instances, CAFs encompass a cell of non-tumor cell origin, wherein CAFs do not harbor tumor cell-characteristic genetic mutations or aberrations. In some instances, CAFs can be converted from fibroblasts, epithelial cells, endothelial cells, adipocytes, pericytes, stellate cells, bone marrow derived mesenchymal stem cells (MSCs), hematopoietic stem cells (HSCs), cancer stem cells (CSCs), CSC-like cells, or a combination thereof. In some instances, fibroblasts are converted to CAFs. In some instances, fibroblasts are converted to CAFs when fibroblasts are activated by growth factors (e.g., TGFβ, hepatocyte growth factor (HGF), platelet-derived growth factor (PDGF), or fibroblast growth factor (FGF). In some instances, fibroblasts are converted to CAFs when fibroblasts are activated by signaling proteins (e.g., Wnt-3A), transcription factors (e.g., NF-kB, HSF-1), cytokines (e.g., IL-2, IL-6), or combinations thereof. In some instances, activation of TGFβ/SMAD pathway, CXCL12/TGFβ1 pathway, PI3K/AKT pathway, MEK/ERK pathway, WNT/β-catenin pathway, GPR30/ERα pathway, TGFβ1/JAK/STAT3 pathway or combination thereof in fibroblasts contributes to convert fibroblasts to CAFs.

[0071] In some instances, CAFs are located in blood circulation. In some instances, CAFs are located in metastatic sites. In some instances, CAFs are located proximal to tumor cells. In some instances, CAFs are located distal to tumor cells.

[0072] In some aspects, CAFs have tumor-promoting functions. Non-limiting examples of tumor promoting functions include, tumor initiation, tumor proliferation, tumor invasion, tumor metastasis, apoptosis resistance, immunosuppression, metabolic reprogramming, therapeutic resistance, induce stromal stiffness, or angiogenesis. In some instances, CAFs modulates angiogenesis, wherein the CAFs enhances vessel density. In some instances, CAFs regulate expression and/or function of genes involved in angiogenesis (e.g., VEGF, MMPs, FGF). In some instances, CAFs play a role in development of desmoplasia that result in deposition of ECM. In some instances, CAFs regulate expression and/or function of genes involved in desmoplasia (e.g., hyaluronic acid, collagens, fibronectin). In some instances, CAFs modulates immune responses. In some instances, CAFs modulates immune responses by recruiting mast cells, polarizing T-helper cells, diminishing activity of natural killer cells, educating macrophages to act as tumor promoter, or combination thereof. In some instances, CAFs modulates contractile, ECM remodeling, ECM production or combinations thereof. In some instances, CAFs are involved in cancer metastasis formation or drug resistance. In some instances, CAFs are involved in cancer metastasis formation via Wnt2 and/or TGFβ. In some instances, CAFs are involved in drug resistance by regulating function of IL6, exosomes, SDF-1, Chi3L1, or combination thereof. In some instances, CAFs are involved in drug resistance by modulating epithelial-mesenchymal transition. In some instances, CAFs are associated with collagen-fibril organization, extracellular matrix (ECM) organization, tissue development in tumor microenvironment or combinations thereof. In some instances, CAFs modulates tumor-suppression.

[0073] CAFs are heterogenous with various sub-populations. Sub-populations of CAFs include, but not limited to, inflammatory CAFs, myofibroblast CAFs, CD146+ CAFs, CD146− CAFs, cancer-promoting CAFs, cancer-suppressing CAFs, vascular CAFs, matrix CAFs, cycling CAFs, or developmental CAFs. In some instances, CAFs comprise of inflammatory CAFs (iCAF). In some instances, iCAFs are converted from fibroblasts upon JAK/STAT/NFkB pathway activation. In some instances, iCAFs are located distal to tumor cells. In some instances, iCAFs modulates immune-modulatory. In some instances, iCAFs modulates developmental process, cellular process to growth factors, vasculature development, or combination thereof.

[0074] In some instances, CAFs comprise of myofibroblast CAFs (myCAFs). In some instances, myCAFs are converted from fibroblasts upon TGFβ pathway activation. In some instances, myCAFs are located proximal to tumor cells. In some instances, myCAFs modulates contractile, ECM remodeling, ECM production or combinations thereof. In some instances, myCAF differentially express a certain subset of genes that are not differentially expressed in fibroblast that is not associated with cancer. In some instances, myCAF can exhibit high expression of genes that are lowly expressed in fibroblasts that is not associated with cancer. In some instances, myCAF can exhibit low expression of a certain subset of genes that are highly expressed in fibroblasts that is not associated with cancer. In some instances, myCAF can exhibit high expression of a certain subset of genes that are lowly expressed in other sub-population of CAFs. In some instances, myCAF can exhibit low expression of a certain subset of genes that are highly expressed in other subpopulation of CAFs. In some instances, myCAF can exhibit a higher expression of one or more genes listed in Table 1 compared to a fibroblast that is not associated with or affected by a tumor cell, a tumor microenvironment, or development of cancer. In some instances, myCAF markers comprise ECM-modulatory gene. In some instances, myCAF can exhibit a higher expression of one or more ECM-modulatory gene when compared to a fibroblast that is not associated with cancer. Non-limiting examples of ECM-modulatory genes include LRRC15 (NM_001135057), MMP11 (NM 005940), COL11A1 (NM 080629), C1QTNF3 (NM_030945), CTHRC1 (NM_138455), COL12A1 (NM_004370), COL10A1 (NM 00493), COL5A2 (NM_000393), THBS2 (NM 003247), AEBP1 (NM 001129), ITGA11 (NM_001004439), PDPN (NM 006474), FAP (NM 004460), COL8A1 (NM_001850), COL1A1 (NM_000088), COL1A2 (NM 000089), FN1 (NM 212482), or POSTN (NM_006475). In some instances, higher expression of ECM-modulatory gene expression is associated with poor response to checkpoint blockade treatment, standard-of-care chemotherapy treatments of cancers, or a combination thereof. In some instances, higher expression of ECM-modulatory gene expression is associated with poor response to checkpoint blockade treatment of cancers.

TABLE 1
Markers of myCAFs
Gene Name

MMP11, COL11A1, C1QTNF3, CTHRC1, COL1A1, COL12A1, COL10A1, FN1, COL1A2,
SDC1, COL5A2, GJB2, LGALS1, TPM1, COL3A1, THBS2, HTRA1, SPARC, CD99,
AEBP1, NBL1, ACTB, MFAP2, TMSB10, LRRC15, MMP14, PLAU, INHBA, POSTN, ITGA11,
ANTXR1, PLPP4, MYL9, COL5A1, MFAP5, ATP5E, IGFL2, F13A1, CD55, GREM1,
COL8A1, MYL6, ARL4C, MXRA5, CALM2, PRSS23, MARCKS, SERPINH1, SUGCT,
SULF1, FNDC1, CALU, CAPZB, ADAM12, GJA1, IGFBP3, SPATS2L, ANXA2, CMTM3,
HCFC1R1, PTK7, ITGB5, CFL1, RUNX2, LOXL2, ID3, LOXL1, CTSK, RGS16, COL8A2,
CDH11, C5orf46, VCAN, FZD1, TPM4, NTM, TAGLN, RAB31, TPM2, NUAK1, KIAA1217,
CAVIN3, RIN2, SOX4, PALLD, PKM, CALD1, ACTA2, EPYC, RARRES2, MATN3,
MYL12A, MMP7, NREP, EDIL3, TMED9, GAS1, PXDN, DERL3, ACTG2, OST4,
S100A16, CNN2, VGLL4, S100A11, P4HB, COL6A3, IL32, MYH9, CARHSP1, SFRP2,
GALNT1, HSPA1A, ENAH, SLC44A1, PDLIM5, SERPINA1, C4orf48, LPP, OSTC, DIO2,
FLNA, RCN3, PDLIM2, PDZK1IP1, KCNQ1OT, KRT7, FBXO32, CTNNB1,
CXCL14, TUBA1A, HSPA1B, MDK, MYLK, ISG15, KRT19, IGLC2, SLC6A6, IFI27,
LUM, MT-RNR1, SPINK1, IGKC, IER2

CAF lncRNAs

[0075] Long non-coding transcripts (or long non-coding RNAs (lncRNAs)) are RNA segments that lack protein-coding capacity, yet, in some instances, can mediate various regulatory mechanisms in cell cycle or cell metabolism by regulating transcription and/or post-transcriptional modification of various genes. As such dysregulation of certain long non-coding transcripts can be associated with an onset, development, or prognosis of a disease or a symptom of a disease. Alternatively and/or additionally, dysregulation of certain long non-coding transcripts can be a signature or indication of an onset, development, or prognosis of a disease or a symptom of a disease.

[0076] In some instances, the expression or activity of lncRNA disclosed herein is upregulated in tumor tissues compared to normal tissues. As used herein, normal tissue includes (e.g., non-cancerous tissue, non-precancerous tissue, a tissue that is not within the cancer microenvironment, etc.) of the same individual, or a tissue from a healthy individual. In some instances, the lncRNA disclosed herein have substantially no or low expression across normal tissues (e.g., in vitro, ex vivo, or in vivo). In some instances, the lncRNA disclosed herein have substantially no or low expression across normal human tissues (e.g., in vitro, ex vivo, or in vivo tissues). In some instances, the lncRNA disclosed herein have substantially no or low expression across normal cells (e.g., in vitro, ex vivo, or in vivo). In some instances, the lncRNA disclosed herein have substantially no or low expression across normal human cells (e.g., in vitro, ex vivo, or in vivo cells).

[0077] In some aspects, the lncRNA disclosed herein is associated with an activation of CAF.

[0078] The term “activation” refers to a situation where fibroblasts are differentiated, converted, or transitioned to CAFs. In some cases, “activation” refers to the change in morphology, gene expression pattern, and/or an element of a signaling pathway of fibroblasts, wherein the change reflects morphology, gene expression pattern, and/or signaling pathways of CAFs. In some instances, morphological changes associated with myCAF activation may involve, but are not limited to, a flattened cell shape and a connective, swirling growth pattern. In some instances, the lncRNA disclosed herein regulates the expression and/or function of growth factors (e.g., TGFβ, hepatocyte growth factor (HGF), platelet-derived growth factor (PDGF), or fibroblast growth factor (FGF) to activate fibroblasts to CAFs. In some instances, the lncRNA disclosed herein regulates the expression and/or function of signaling proteins (e.g., Wnt-3A), transcription factors (e.g., NF-kB, HSF-1), cytokines (e.g., IL-2, IL-6), or combinations thereof to activate fibroblasts to CAFs. In some instances, activation of TGFβ/SMAD pathway, CXCL12/TGFβ1 pathway, PI3K/AKT pathway, MEK/ERK pathway, WNT/β-catenin pathway, GPR30/ERu pathway, TGFβ1/JAK/STAT3 pathway or combination thereof in fibroblasts converts fibroblasts to CAFs.

[0079] In some instances, the expression or activity of lncRNA disclosed herein is upregulated in CAF. In some instances, the expression or activity of the lncRNA disclosed herein is increased in CAF compared to fibroblast that is not associated with cancer (e.g., non-cancerous or non-precancerous fibroblast, fibroblast that is not within or nearby the tumor microenvironment, etc.).

[0080] In some instances, the transcription of the lncRNA disclosed herein is enhanced in CAF compared to fibroblast that is not associated with cancer. In some instances, the expression or activity of the lncRNA disclosed herein is decreased in CAF compared to fibroblast that is not associated with cancer. In some instances, the transcription of the lncRNA disclosed herein is decreased in CAF compared to fibroblast that is not associated with cancer. In some instances, the expression or activity of lncRNA disclosed herein is upregulated in human dermal fibroblast (HDF) treated with TGFβ with or without starvation. In some instances, the expression or activity of lncRNA disclosed herein is upregulated in myCAFs. In some instances, the expression or activity of the lncRNA disclosed herein is increased in myCAF compared to fibroblast that is not associated with cancer. In some instances, the transcription of the lncRNA disclosed herein is increased in myCAF compared to fibroblast that is not associated with cancer. In some instances, the expression or activity of the lncRNA disclosed herein is decreased in myCAF compared to fibroblast that is not associated with cancer. In some instances, the transcription of the lncRNA disclosed herein is decreased in myCAF compared to fibroblast that is not associated with cancer. In some instances, the expression or activity of lncRNA disclosed herein is specific to myCAFs. In some instances, the expression or activity of lncRNA disclosed herein is upregulated in myCAFs from head and neck squamous cell carcinomas. In some instances, the RNA expression level of the lncRNA disclosed herein is at least about 10%, at least about 20%, at least about 30%, at least about 40%, at least about 50%, at least about 60%, at least about 70%, at least about 80%, or at least about 90% more than in a myCAF compared to fibroblast that is not associated with cancer. In some instances, the RNA expression level of the lncRNA disclosed herein is at least about 1.5 folds, at least about 2 folds, at least about 3 folds, at least about 4 folds, at least about 5 folds, at least about 6 folds, at least about 7 folds, at least about 8 folds, at least about 9 folds, or at least about 10 folds higher in a myCAF compared to fibroblast that is not associated with cancer.

[0081] In some instances, the lncRNA disclosed herein is identified by comparing sequencing data of myCAF to sequencing data of fibroblast that is not associated with cancer, wherein the data is produced via Nanopore direct RNA sequencing. In some instances, the lncRNA disclosed herein is identified by comparing sequencing data of myCAF to sequencing data of fibroblast that is not associated with cancer, wherein the data produced via total RNA-Seq. In some instances, the DNA variants of the lncRNA described herein are identified by comparing sequencing data of myCAF to sequencing data of fibroblast that is not associated with cancer, wherein the data is produced via polyA-selected RNA-seq. In some instances, the lncRNA disclosed herein is identified by comparing data from myCAF to data from fibroblast that is not associated with cancer, wherein the data is produced via GWAS and common variant calling. In some instances, the lncRNA disclosed herein is identified by comparing data from myCAF to data from fibroblast that is not associated with cancer, wherein the data is produced via CUT and RUN probing, for example, histone modifications or transcription factors. In some instances, lncRNA disclosed herein is identified by comparing data from myCAF to data from fibroblast that is not associated with cancer, wherein the data is produced via ChIP-Seq probing, for example, histone modifications or transcription factors. In some instances, the lncRNA disclosed herein is identified by comparing data from myCAF to data from fibroblast that is not associated with cancer, wherein the data is produced via single-cell RNA seq (scRNA-seq). In some instances, the lncRNA disclosed herein is identified by comparing data from myCAF to data from fibroblast that is not associated with cancer, wherein the data is produced via bulk ATAC-seq.

[0082] In some aspects, the genomic region that is transcribed to one or more lncRNAs disclosed herein is located within chr3:194355288 to chr3:194370349 (+). In some instances, the genomic region that is transcribed to the lncRNA disclosed herein is located within chr3:194355288 to chr3:194358966 (+). In some instances, the genomic region that is transcribed to the lncRNA disclosed herein is located within chr3:194368496 to chr3:194370349 (+). In some aspects, the genomic region that is transcribed to the lncRNA disclosed herein is located within chr6:74958809 to chr6:75026433 (−). In some aspects, the genomic region that is transcribed to the lncRNA disclosed herein is located within chr1:66390975 to chr1:66516344 (−). In some aspects, the genomic region that is transcribed to the lncRNA disclosed herein is located within chrl2:67394371 to chrl2:67455635 (+). In some aspects, the genomic region that is transcribed to the lncRNA disclosed herein is located within chrl2:67394371 to chrl2:67590771. In some instances, the lncRNA ENSG00000203585 is transcribed from a genomic region located within chrl2: 67394371-67590771 (+). In some instances, the lncRNA SHARED_00113753 is transcribed from a genomic region located within chrl2: 67394371-67455635 (+). In some aspects, the genomic region that is transcribed to the lncRNA disclosed herein is located within chr9:87219871 to chr9:87277312 (−). In some aspects, the genomic region that is transcribed to the lncRNA disclosed herein is located within chr2:215718043 to chr2:215720944 (+). In some aspects, the genomic region that is transcribed to the lncRNA disclosed herein is located within chr1:230710698 to chr1:230795492 (−). In some instances, the genomic region that is transcribed to the lncRNA disclosed herein is located on the sense strand. In some instances, the genomic region that is transcribed to the lncRNA disclosed herein is located on the anti-sense strand. In some instances, the lncRNA disclosed herein comprises XLOC_055514, XLOC_055515, XLOC_069921, XLOC_005184, ENSG00000203585, SHARED_00113753, or a fragment thereof. In some instances, the lncRNA comprises XLOC_055514, XLOC_055515, XLOC_069921, XLOC_005184, ENSG00000203585, ENSG00000288903, ENSG00000230838 (LINC01614), ENSG00000244137, or a fragment thereof. In some aspects, the lncRNA disclosed herein comprises a sequence set forth in Table 11. In some instances, the sequence of the lncRNA disclosed herein can be found in a public database (e.g., Ensembl, ensemble.org/Homosapiens/). In some aspects, the lncRNA described herein is transcribed from a genomic region listed in Table 10 or Table 12. In some aspect, the lncRNA described herein is transcribed from a subset of a genomic region listed in Table 10 or Table 12. In some aspects, the lncRNA described herein comprises a sequence listed in Table 11. In some aspects, the lncRNA described herein comprises a fragment of a sequence listed in Table 11. In some aspects, the lncRNA described herein shares at least 50%, at least 60%, at least 70%, at least 80%, 85%, 90% or 95% sequence homology with a full-length sequence listed in Table 11. In some aspects, the lncRNA described herein shares at least 50%, at least 60%, at least 70%, at least 80%, 85%, 90% or 95% sequence homology with a fragment of a sequence listed in Table 11.

TABLE 10
Genomic regions (coordinates with strand information)
which encode exemplary lncRNAs associated with myCAF

| lncRNA name | SEAL# | Genomic coordinates (strand) |
|---|---|---|
| XLOC_055514 | SEAL1 | chr3: 194355288-194358966 (+) |
| XLOC_055515 | SEAL9 | chr3: 194368496-194370349 (+) |
| XLOC_069921 | SEAL2 | chr6: 74958809-75026433 (−) |
| XLOC_005184 | SEAL3 | chr1: 66390975-66516344 (−) |
| ENSG00000203585/ | SEAL4 | chr12: 67394371-67590771 (+) |
| SHARED_00113753 | | |
| ENSG00000288903 | SEAL5 | chr9: 87219871-87277312 (−) |
| ENSG00000230838 | SEAL6 | chr2: 215718043-215720944 (+) |
| (LINC01614) | | |
| ENSG00000244137 | SEAL7 | chr1: 230710698-230795492 (−) |

TABLE 11
Sequence of XLOC_055514, XLOC_055515, XLOC_069921, XLOC_005184, and SHARED_00113753

| SEQ | | |
|---|---|---|
| ID | | |
| NO. | Sequence | Description |
| 2060 | CCCCUCCGGGCCUCUGUAGACUCAGUUAGUCCACAGCCUGCUCACUUCGU | RNA |
| | GGGAAUAGUUCUCCGCUGAGAUAGCCCCUCUCGCCUAAGUAUUAUGUAAG | sequence |
| | UUGAUUUCCCUUCUUUUGUUUCUCUUGUUUGUGCUACGGCUUGACCCAGC | of |
| | AUGUCCCCUCAAAUGAAAGUUCUCCCCUUGAUUUUCUGCUCCUGAAGGCA | XLOC_ |
| | GGGUGAGUUCUCUCCUCAAAGAAGACUUCAAACCAUUUAACUGGUUUCUU | 055514 |
| | AAGAGCCGUCAAUCAGCCUGGUUUUGGGGAUGCUAUGAAAGAGAGAAGGA | |
| | AAAUCAUGCCGCUCAGUUCCUGGAGACAGAAGAGCCGUCAUCAGUGUCUC | |
| | ACUUGUGAUUUUUAUCUGGAAAAGGAAGAAACACCCCAGCACAGCAAGCU | |
| | CAGCCUUUUAGAGAAGGAUAUUUCCAAACUGCAAACUUUGCUUUGAAAAG | |
| | UUUAGCCCUUUAAGGAAUGAAAUCAUGUAGAAUUUUGGACUUCUAAAAAC | |
| | AUUAAAAUCAGCUUAUUAAUACGGGAUAGAGAAAGAAAUCUGGUGCCUGG | |
| | GGGUCCCUGUGUUCACCCCUAGAGUUUGUUUUAAAAUUUUUAAUUGAAGC | |
| | AUGUGAAGUGUACGUGCAGAAAAGUGGGAACAUGAUAGUGUAUGGCUUGG | |
| | UGGAUUUUCACAAACUGAACAUACCUGUGUAAUCAGCAUCUAGACCCAGA | |
| | CCCAGAGCAUCACAAAUAUCCCCCAUCCUGGGCUUUUCCCAGAGGAGAUG | |
| | GGGGCUUCUGAAGAUGGACUUACCUGGGACCUGCCCCCCAUGAGCCAGGA | |
| | CGGUCCCCCCACAGUCAGCCUGUGCAAAGGCCCCGUGGCCAGGGGUGGAG | |
| | GAGAAUAUGUGGGUGUGGACAGGAUGGGAGACUGUGGCCUGAACAGGAGA | |
| | UUUUAUUAUAUCUGGAGACCCUGAGAGACCCUGAGACCUGGGGCACCAUG | |
| | GCUGGCCAGGUCAGAAGCAUCCUGACUGCAGAGGUCCGUGCAGCCACACC | |
| | CUCUUCCCUGCCAGCAAGCUGUCUGCGGCUCAUCGGAGGCCCCUCCGCCU | |
| | GGAGCCUUCUAUGGACGUGAUAUGCCUGUAUCUGUUUUUAAUUUUCAUUC | |
| | UUCACUUAGGGGAAGUGAAAUCGCUCAGAGAUGAGAUCCUUUAAUUGAAA | |
| | ACGAAGUGUAACGGAAUCUAGUGUCUUUCUAAUGUGGUAAAAUUCUCCAU | |
| | CAACAUCACAGUCAGCUGGCAGCUGAACUUCAGAAUCUCACUUACAGCAG | |
| | GCGACACGGGGGUACACCGAUGGGUCACACUGGGUCUGGGGGCUCCCUGG | |
| | AGCUCCUCCUGCGUGUGGUCUGGUUAGGAGUUGAGUUGUUUGCUCCAGGG | |
| | UUAUUCUCCUCCUCGAGUCACAGUCACACGAAUACCUGCCUUCUCUGGCU | |
| | UUCCUGCUAUACACAUAUUCACAUGGCGCUCAAGAAGUUAGGCUCAUGGC | |
| | AACGUGUGUCUUUCUCUGGACAACUGGCCCAGUUUACAGUGAAAUGGAGA | |
| | AUUUCAGGUCUCCACGUCUGCCCAGGAAAGAACUUCAGCUGACUCCACGG | |
| | GGAUCUGGAAAUCCACGACCAAUCCCGAUCGGCUCUUAUUAGCUCCCCGC | |
| | UCCACAAGACACCUGUGCUUUGGAAAUCCACCACCAAUCCCGAUCGGCUC | |
| | UUAUUAGCUCCCCGCUCCACAAGACACCUGUGAUCUGGAAAUCUACCACC | |
| | AAUCCCGAUCGGCUCUUAUUAGCUCCCCGCUCCACAAGACACCUGUGACA | |
| | UCCUCCAGGGCCACAGGAGCACGUGCUGACCAGUUUUCCCUUCCAGUUCC | |
| | UGCACAAAAAGUGUCCAGAGGGCUGUUUGCAAACACUAGUGCACUUUGUA | |
| | GCUUUUCACCCUCUGUCCCAGGGAAUCUAGGAGAGAUGAGGCCCGUCAGA | |
| | GUCAAGAGAUGUCAUCCCCCCAGGGUCUCCAAGGCAUUUCCACACUAUUG | |
| | GUGGCACCUGGAGGACAUGCACCAAGGCUUGCCAGAGCCAACAGGAAGUG | |
| | AGCCCAGAGCAUGGCACAUGAGCAUCACCCGCUGAUGGUGGCCUGCUGUG | |
| | CCUGGUGCCAACAGGGGCAUCCCGGCCCGUACCCCUCCAGACAGGAAGCA | |
| | UGGGUUUGCCCACAGACCUGUCGGGUGCUCCUGUGAGUGGCCUCCAGAUG | |
| | UCUUUGUGCAUAGGCACAAGUGGGCCAGGGCUGGAGGGAGGUGGGAAACC | |
| | UCAUCAUCCGGUGGGCCCUGCCAAUCUUAACCCAGAACCCUUAGGUAUUC | |
| | CUGGCAGUAGCCAUGACAUUGGAGCACCUUCCUCUCCAGCCAGAGGCUGA | |
| | CCUGAGGGCCACUGUCCUCAGAUGACACCACCCAGGAGCACCCUAGGUGA | |
| | GGGGUGAGGGCCCCCUUAUGUGAACCUCUUGCCUCUUCCUUUCUCCCAUC | |
| | AGAGUGGUUGGAUGGAGCCAUUGGCCUCCUUUUCUUCAGCGGGCCCUUCA | |
| | ACCUCUCUGCACCAUGUUGUCUGGCUGAGGAGCUACUAGAAAAGCUGAGU | |
| | GGAGUCUCCUUUCCAACAGGAUGAUGCAUUUGCUCAAUUCUCAGGGCUGG | |
| | AAUGAGCCGGCUGGUCCCCCAGAAAGCUGGAGUGGGGUACAGAGUUCAGU | |
| | UUUCCUCUCUGUUUACAGCUCCUUGACAGUCCCACGCCCAUCUGGAGUGG | |
| | GAGCUGGGAGUCAGUGUUGGAGAAGAAACAACAAAAGCCAAUUAGAACCA | |
| | CUAUUUUUAAAAAGUGCUUACUGUGCACAGAUACUCUUCAAGCACUGGAC | |
| | GUGGAUUCUCUCUCUAGCCCUCAGCACCCCUGCGGUAGGAGUGCCGCCUC | |
| | UACCCACUUGUGAUGGGGUACAGAGGCACUUGCUCUUCUGCAUGGUGUUC | |
| | AAUAGGCUGGGAGUUUUAUUUAUCUCUUCAAACUUUGUACAAGAGCUCAU | |
| | GGCUUGUCUUGGGCUUUCGUCAUUAAACCAAAGGAAAUGGAAGCCAUUCC | |
| | CCUGUUGCUCUCCUUAGUCUUGGUCAUCAGAACCUCACUUGGUACCAUAU | |
| | AGAUCAAAAGCUUUGUAACCACAGGAAAAAAUAAACUCUUCCAUCCCUUA | |
| | AAGAAUAGAAUAGUUUGUCCCUCUCAUGGGAAUUGGGCUGUAUGUAUAUU | |
| | GUUCUUCCUCCUUAGAAUUUAGAGAUACAAGAGUUCUACUUAGAACUUUU | |
| | CAUGGACACAAUUUCCACAACCUUUCAGAUGCUGAUGUAGAGCUAUUGGG | |
| | AAAGAACUUCCAAACUCAGGAAGUUUGCAGAGAGCAGACAGCUAGAGAUA | |
| | ACUCGGGACCCAGAGUUGGUCGACAGAUGUUAGAUGUAUCCUAGCUUUUA | |
| | GCUAUAAACCACUCAAAGAUUCAGCCCCCAGAUCCCACAGUCAGAACUGA | |
| | AUCUGCGUUGUUGGGAAGCCAGCAGUGGCCUUGGGAAGGAAGCCAUGGCU | |
| | GUGGUUCAGAGAGGGUGGGCUGGCAAGCCACUUCCGGGGAAAACUCCUUC | |
| | CGCCCCAGGUUUCUUCUUCUCUUAAGGAGAGAUUGUUCUCACCAACCCGC | |
| | UGCCUUCAUGCUGCCUUCAAAGCUAGAUCAUGUUUGCCUUGCUUAGAGAA | |
| | UUACUGCAAAUCAGCCCCAGUGCUUGGCGAUGCAUUUACAGAUUUCUAGG | |
| | CCCUCAGGGUUUUGUAGAGUGUGAGCCCUGGUGGGCAGGGUUGGGGGGUC | |
| | UGUCUUCUGCUGGAUGCUGCUUGUAAUCC | |
| 2061 | UUUUUAGAGGGGACACAGUGGUCGUAAUUAUAUUUUUCCUUGGAAUCUAA | RNA |
| | AGUAAAUGCUUCUUCCAAAAUGUUAACAACAGAUGAAACACAUUAAUUGU | sequence |
| | CUGUAAAUUUAAAGCCAAAUAAAAAGUUUAAAAUAAGAAAGAAAGAAAGA | of |
| | AAGAAAGAGAAGAAUGAAUAAGUUUUCUAGAACCACAGGGAGAAGCACUU | XLOC_ |
| | GCCAAUACUUCUAGGAGCAAAGAAACGCCCCUGAAUCCUGCUCCAUCCCU | 055515 |
| | UUCUCGGGGUCCUUGUCUCCUUGGCCAGGGCAGGGCAGCAGGGGGUCCAC | |
| | AGUCACUUAGGGAGGGGUUUACCGGGUCGUUGUAAACUCCCCUCUCACGG | |
| | UGGCCAAUGCAGUGAAGGAAUCCAAAAGAUACACUGGGGGAAAGAAGGAA | |
| | AGAGGAAAAUGUGUCCUGAGUUUUUAAAUACGGUUGAAGCAAACCCCUUA | |
| | CAUUUAGGGAUGCCAGCUAUGUGUACCCUGUAGUGUCAGCCCGGGACAUG | |
| | CAGGCACUGCACUGUGGCCCACAGUCCCCCCUCCCAGGGCCAACACUGCC | |
| | CUCUGCAGUGACUCACGCCCGGGAUAGUUUAAAUACCGGGACAGCUUAGG | |
| | CGAGCCACACUCAUGCUGCAGCCUUGAGCCGUCCCUCGUCCUCCUCUCAG | |
| | GCUCCCUCUUGUCCACGGCGGGCGGGCGCCGAGCUGCUGGUAAGUAGGCA | |
| | AGCCACCCCCAUCCCUCCUCUCUGCUUAGAGGGCCCGGCCAGCCCCUUCC | |
| | CAUUUCUGCUGGACCUGCUCCCCUCGGAGACCCCAGAAGGGGCAGAGCUG | |
| | ACAUGUGCCUGGGGAUGCUCUCGGGACAGGGACAGAAGCAGCCUGUGCUG | |
| | GAGGGGUGCAAGCCUGUCUCCCUCACUGCCUGGACACCAGGACCACCAGC | |
| | CCCUCUGCUGAUGCCUCAACAGCCUCUUAUGCCCCUUGCCCUGAGCGGCU | |
| | CAUGAUGUCAACCUGGGGUGCUGAGAUGUCUGAGACCAGCAAGUUGGGCU | |
| | GAAAGUGGACUAAAUUAUCACCCCCCUUGUCACUGGAUUGACCGUUCUGG | |
| | AAUCUAGAUCCACUGGGGGAAGAACUUCUCUUUUUAAGGUUCAGAUUAUU | |
| | UGCGCCUGUGCCAUCUUUCCUGGCACUUGCCCUGGUGGCUCCCAGUGGUC | |
| | UGCCCCGCAUUUGGUUCUGCCCAAGACCUUCCUUCAUGGGGGUUUCCCAG | |
| | GCAAGAGAGCUGUCUGCUUUGCAUAGAUGGAUAACUCCUGCAAGUGUAAC | |
| | UUCAGCAGAUGUGCUGGUCCCUGGUUUGCAGUUCCAAUUUGGAAUUCGGA | |
| | CAUGGGCUCAGCAUUGUUCAGGCUCUAACAGUGUGGCUUAGGGGACACUA | |
| | UGCUGGCAGUUUCCCCUCUCUCCUGCUGGAAGCGUCGGCCUCUGUGGAGC | |
| | CUGGAGGCUUUGAGCAGGGAGUCAGGGCAGGAGAUGGAUUUGUGAUGAGG | |
| | UGGUAUGUGGAUUUGAAAUUGUGACGGCUGCACCUUGACCCGUGUCUCUG | |
| | CUCAAACGUAGAGGCAGGACCUGGGGCCAAGAAACCAACUGUGGAAAACC | |
| | AGAGCUUUCAGGACUCUCCCACCCCUGCCAAAGUGCAAGAGCCAUUCCAC | |
| | CUCCCGGGCCCAGGGCAUCACCUCGGUGCAGCUGCACUCUCUCUGAGAUG | |
| | ACACGUGUGCUCCAGUCGCAGGUGCCAGGUGCCUGUCUGCCACGUGCCAG | |
| | CUUCUCCUUUGGGGUUAUCUGGGAUGCGUCACUUUACCUUGGGCAGCUCU | |
| | CAGAUGUGUUGCUGCCACUGGCUCCUUAAUUUAGAAGUGCUCUAACGGCU | |
| | GGCACUUCCUUCAUUCUGCAGAGACUGAACAUCUGGAGUAAAUUCAGGGC | |
| | CAGA | |
| 2062 | UAAAGCCAGAAUUCUCCUGCCAGGAUUCCAUCAGGAGUUACCUGCUGGCU | RNA |
| | CGAUGUCCCAGUCUGUGCUUAAAGCAGGAUGAGAAAGCUUUGCCACAGGA | sequence |
| | AAUGAGAUAAUGCAUGUACAAACUCAUUUAUCUUCUCAGGAAAAUACAUU | of |
| | ACUUUAAGUUGUAUCUUUAUGCUCUACACAUUUUAACAGACACACAGCAG | XLOC_ |
| | UUACCCUUGGUUUUUCUUCUUUACUGUCACUGAUUCACAAUCAUAAUUAA | 069921 |
| | AAAUGCCAAACGCAUCUUUAUGUGAAACAAAAUAAUUUUUUUCUUAUUUU | |
| | UAUAGACAAAACCGUCCAAAAUGACAUAUUUUUCUCCAGGAAAGACAGCA | |
| | UGUUGGUGUAGGAAACAGAGUUAGUGUGCUAUGGAGUUAGAAGACCUGGA | |
| | UUUCACCAUUUAAAAGCCAUGUGAACUUGAGCCAGUCCCUGAACCUGUUU | |
| | AUUCAUCUAUUAAAUGAAAAAUAGGAAUCUCUCUAAUUCAUGAAAACUUU | |
| | GAGAAGAUUAAAUUAGACAAGAUGAAUGAAAAGAAUUCCAAAUAUACAAA | |
| | UCACAUGCAAACAAGUCUUGGCUUAUUAGUCUACUGGGAGCAGAUUACUA | |
| | CUUUGAAUCUUAAUGCCCUCUCUUUCAGGUUAAUAUGCAAAAAUACACAC | |
| | AAAACACUUAAAAUGUAAAAAGAGGUAGUGACAUCACUUGCUGACUUAAG | |
| | UCUGAACUCAAAUUGGUUAACCUGCCUAUAUAUGGAAAAAUUUCCAUUUA | |
| | AAUGAAAAUAUUUCACUAGCCCACAAACAGCCUUAGACGUGGUUUCCUGU | |
| | UUACCUUUAAAUGGAUGUUGUGGUUUCUUCUUAAUGAUUGGAGGAAGUUC | |
| | CAAAUUUUGGUGAAAUGAUCUCAUUUAAACAUAGAGCAGGAUAUGAGAAA | |
| | GAAUGAUUAACUUGUGGUUCCGAUUGAUGUUGUAUAUUUUACACACAGCU | |
| | GGAUAAGUCUAUUGUAAUAAUUAAAAAUUUAUUUCACUAAUUUUUUAUUU | |
| | UCAUGAAUAUUAAUUAUUAUGUCCUAAGCAUUGUUGUAGAGAUUAAUAAU | |
| | GACAAUAAUGAAGAAGAUAUUGUCCUUGCUUUCAAGGAGUUGUUAAUUUA | |
| | GUUUAGAAAAUAGGCAAGGAAAUCAGUGAUUGCAGUAUAAAGUGGUAACU | |
| | GUCUUUAGAAGUUGGUGUGAUCUGUUUGAUAUUAGAUGUUUCUUGGCUGC | |
| | UACUUCUGGAGUAAUUUUUAACGGUGCUAUGUAAGAAUUCCAUUGUUCAC | |
| | AUAAGUAUGCAAUGGAAGGUCUACUUUUCAGCUCAGAUUCAUUUAUUGUU | |
| | UCUCACCCUCUUUCCACAACCCAGAAGGUACUUAGUGAGUCUCCUUAAGU | |
| | GACAAAUAGUAUUUGACUCUUUCCAUUAGAAUUACUCAUGAUUUCUUUUC | |
| | CCUUGUCUAAUAUUCACAAGAUUUCUGCUAGAACAGAGAGAAUACAGUCC | |
| | UCAGAAAUACAAACACAAAUUAUUUAGUUUAGUUAAAUUAUAAGGCUGCA | |
| | GCAUUGCAUACACACAGGCAGUAUUUUGUUGAGUAAAAUGGCAGGAAGCC | |
| | AAAACUUUUAUAGAAACCCGCUGAUAAUUCAACACUUAAAAACUAUGAUU | |
| | UAAAAAUGUACAAGUGAAAGAUGAUUUCUUAGAAAUGCAGUAAUCUUUUA | |
| | GCAACCAUAUCAAUGCUGAUAGCAGGGGACAAGAGGGUCACAAAGAGAUU | |
| | CCAGAAAAGAAUAGGUUCUUUGUCUUGCUUACUCUGGGUUAGUUAUUACC | |
| | AGUUUUCUGGUAAGGAAGAAUUAGAGGUAAAUAUCAGAACUUACUAAACA | |
| | UACCAUAGGUCACUGUUUAGUGGCCACUAUUUUCACAGGGGUAUGUGAAA | |
| | AAUGUAACUCCUUCCCUUUUCUUGCAUAUCAAUUUGAGCUCACUUAGCCA | |
| | GCCCUCUUUCUGCUAGAUAGUAGGAAACUUUAUCUAGAUAAUUCCAGGUG | |
| | AGCCUAGACAUCAUCCAAUGUUUCACCAAGUGUUUUUUUUUAAUUCCCAU | |
| | UUCUCUGUCCUUUUCUUCAUGAAAUCAUCUAAGAUUGGCUAGGGGCGGUG | |
| | GCUCACGCCUGUAAUCCCAGCACUUUGGGAGGCCGAGGUGGGCGGAUCAC | |
| | GAGGUCAGGAGAUCAAGACGAUCCUGGCUAACACGGUGAAACCCUGUCUC | |
| | UACUAAAAAUACAAAAAAUUAGCUGGGCAUGGUGGCAGAUGCCUGUAGUC | |
| | CCAGCCACUCGGGAGUCUGAGGCAGGAGAAUGGCAUGAACCCGGGAGGUG | |
| | GAGCUUGCAAUGAGUGAAGAUUGGGCCACUGUACUCCAGUCUGGGCGACA | |
| | GAGCAAGACUCCAUCUCAAAAAAAAAAAAAAAAAAAAAAAAAAGAAAGCA | |
| | UCUAAGAUCUCCAGCUUUGGCAGAACUAUCAAUCCAUGUUGGCACCUGUC | |
| | CAGAUGCCUGUGUUUGCCUGUCUGAGCUCUGCUCCUGGUGACAUGGCCUC | |
| | UCCAGAUCUACAGAUUGUUUCUUAGCUAGUAUCAGGCUCCUUUGCUAUUU | |
| | UACUUGGCACUUUAAGAUGGGACUGUGGAAGAUUCUCUGGGCUACAGGCC | |
| | AGCUGGCCAGGCUCCCCUGCAGCCAUUCUGUCCCCACUUUACCAGGGAGG | |
| | UAGGAGAAACUUUGGCAAGGUUGCCACCCUUACAGUCCGGACAGGCAGAC | |
| | UGUACACUUCUUCUACUCUGGGACUCCUCUAAAUCUAUCUUUCAGUAGAG | |
| | AUCUGCCUGGGGCACCUAAAAGGUGCCCUCCACCUUCUAGGACCUAAGUG | |
| | UUUUUAGGUAGUUUUGGGGUAGAAGGUGGUGAUAAAAAAUUCCCAUGUUA | |
| | UCACAUUUUCCUUCAAAUAUUACUAUGAUACAGCUAGACUGUGCUUUCAA | |
| | AAUGAAAAUCUGCGAAUUUUAUGUCUCGUUUGUCCCCUGAUUCUGCACAC | |
| | CUUGGGGUUAAUGGAAGACUUAUAUUUAGUUCUGUCAGGUAGUAUGAAAA | |
| | AACAUGGUACUGUGAAGAGAAGCAGCUUUUCUUUACAACGUGCAUGGUGA | |
| | UUCUUGAGAAUUCUGCUGUUGUCUUCAUAAAUUUCUGGGGUUAGUAAUGC | |
| | CUCCAGGUGUCUUUGCAGGUAAAUAUGUCUACUAGGUUUCCUUUCAGAUG | |
| | CAGCUUUAAUGCUUAGGGCUGGUAAAGCUGGUAAGAACUAUUCUUGGAGA | |
| | AUUCCAUCUAACAGUUUAUCUGUGUCUAGAGUAGUAACAGUUGCUUAUGU | |
| | GAAGAGAACAAAGAAUUACAGAAGAGGAAUUAUGUUAACAUUUUACUUCA | |
| | GAGACAGGUUUAAUUUAUUUUACUACAUGAGCCCCUUUAGAUACGGAGCU | |
| | GAUAGUAAUUUCUUGCUGAAAGAACUAAAACGACCACUUCAUUGGAAACU | |
| | CAUUAAGGAAAAUGCCUGUGUAUUAUAACAUCACCUUAGUCCUUACUUGU | |
| | AGAAGAGCACAUAAUAGUCCCUUAAAUUUUAUUGAAUGAGUAGAAUUUCA | |
| | GGCUACAAUGUACCAACUUGCCCUAUAAAUUUUGUCAGGUAAUGUUGGUA | |
| | UAUUUUUCAAACACAUUUCUUAGGACUAUCAAAAAAAAGCAGAGACAGAA | |
| | AUUAAAGUGGUAAAGGGAAAUUUUAUUCAGGACUAUUGCAAUAGGGGAAG | |
| | AGAGACCCCCAUAUAGAACUGGGCUUCAUUCUAAAUACAUCAGGGAUAAG | |
| | UAGGGAUUUAUAGCCAAAGAGCAGGGAUCAGAAAAUUUUUAUGUAUUUAU | |
| | UUAUUUAUUUAUUUAUUAUUAUUAUACUUUAAGUUUUAGGGUACAUGUGC | |
| | ACAAUGUGCAGGUUAGUUACAUAUGUAUACAAGUGCCAUGCUGGUGCGCU | |
| | GCACCCACUAACUCAUCAUCUAGCAUUAGGUAUAUUUCCCAAUGCUAUCC | |
| | CUCCCCCCUCCCCCCACCCCACAACAGUCCCCAGAGUGUGAUAUUCCCCU | |
| | UCCUGUGUCCAUGUGUUCUCAUUGUUCAAUUCCCACCUAUGAGUGAGAAU | |
| | AUGCGGUGUUUGGUUUUUUUGUCCUUGCGAUAGUUUACUGAGAAUGAUGA | |
| | UUUCCAAUUUCAUCCAUGUAUCUAAUUAAACUAAAGAGCUUCUGCACAGC | |
| | AAAAGAAACUACCAUCAGAGUGAACAGGCAACCUACAAAAUGGGAGAAAA | |
| | UUUUCGCAACCUACUCAUCUGACAAAUGGCUAAUAUCCACAAUCUACAAU | |
| | GAACUCAAACAAAUUUACAAGAAAAAAACAAACAACCCCAUCAAAAAGUG | |
| | GGUGAAGGACAUGAACAGACACUUCUCAAAAGAAGACAUUUAUGCAGCCA | |
| | AAAAACACAUGAAAAAAAUGCUCAGAAAAUUUUUAAGAAGAGAUACCAAG | |
| | UCUGGGGGAAAUUCUGGCAGAACCAACCUAACAGGAUUCCUGCUGAAAAC | |
| | AGGCGAGGGUGAUCAGCUAACAGGAGUGGGCAGAGAAAAAUUUUGAUCAG | |
| | AUACUGAGGGUGAUCAGAUAUCAAGGAUGAAUAAUUCUUGCUAAACUGUG | |
| | UUGGCCGUAUUAUUUGCUAAAACUGGGUUUUAGAAUGAUGUGCACAGACA | |
| | GGCCCAGGAGAAAGUCCAGAAGCCUGACUAAAGUUUGGCCAAGCAAAGAA | |
| | CUGUUGUUAGAAUACAGUCCCACAAGAAGCCAAAUGACAAAAUAAAUAUA | |
| | UAUAUAUAUAAACAACAGAAGAAGAGCUUCUGGCAAGUAAGUUUGAGAAA | |
| | UAGCUGUAUAUCACAUGCACCUUUGAAAGUGUAUUUUAAAUAACAUUAUA | |
| | CCAAAAUUUCUUCAUUUGUUCUUUCUGUAUCUACUCUAUUAAUAUGCUGC | |
| | UUUAUUCUUUUUCUCAUUUAUUAAACAUUAGGAUUUAAUAUACUAACUUC | |
| | UUUUCUAUUAUUAAUAACUGAUCAUCAUGACACUCAUGAUUAAUUAAAUG | |
| | UUUCAUUACAUAAGAAUGGCAUUGGGGCAAUAUGGAAAAAAGAGGUAGGU | |
| | UUUAUUUAUCUAUAGAUAUUUAUUUUAUUUUAUUUUUUUUUGAGUGAAAU | |
| | UCUGCUUUAUUUUAUAAUUAGAAAGGGCCAAGCUUUCUCCUGGUUCAGCA | |
| | AACCAUCUCUGAUGAGCAGGUUAGGGGCAGGUUACCAGACUACCCACCAU | |
| | UCCCUUUUGUCAGAUGCUCAGACUGCUCAACCGUAAGGGUUGGUCCUGCC | |
| | UCAGAACCCACUCUGGUCAUAGAGAUCACAAACUAGGGUCCAUCUGUCAG | |
| | UCCUGACAUUUCUCUAGGGGAAGGUGGAAGGAGAGAAUUAGAGAUGUCUC | |
| | UAGUUGCAGAAUUAUGGCCUGCAGUGGGUCAAAGGAACAUGACUAAGACC | |
| | UCACAAAAGACAAGAUUCUAUCUUGUGGUGAGGGGUGUGGUUGGGGGUAG | |
| | GAAUUAAUCAGAGUGAAGCAUUCUUGCCUAGAGGUAAAGCUCUCCUUUUU | |
| | CUUUUCUUUUUUUUUUUUUUUUUGUUUUCUUUCUUUUAUUUAAUUUAUGU | |
| | GAUGAAACCUGGUCAAAUUUUGGGCUGAGUUUUUUUUUUUUAGUUGAUCA | |
| | UUCUUGGGUGUUUCUGGCAGAGGGGGAUUUGGCAGGGUCAUAGGACAAUA | |
| | GUGGAGGGAAGGUCAGCAGAUAAACAAGUGAACAAAGGUCUCUGGUUUUC | |
| | CUAGGCAGAGGACCCUGCGGCCUUCCGCAGUGUUUGUGUCCCUGGAUACU | |
| | UGAGAUUAGGGAGUGGUGAUGACUCUUAACGAGCAUGCUGCCUUCAAGCA | |
| | UCUGUUUAACAAAGCACAUCUUGCACCGCCCUUAAUCCAUUUAACCCUGA | |
| | GUGGACACAGCACAUGUUUCAGAGAGCAUAGGGCUGGGGGCAAGGUCAUA | |
| | GAUCAACAGCAUCCCAAGGCAGAAGAAUCUUUCUUAGUACAGAACAAAAA | |
| | UGGAGUCUCCCAUGUCUACUUCUUUCUACACAGACACAGAAACAAUCUGA | |
| | UUUCUCUAUCCUUUCCCCACAUUUCCCCCUUUUCUAUUCCACAAAACCGC | |
| | CAUCGUCAUCAUGGCCCGUUCUCAAUGAGCUGCUGGGUACACCUCCCAGA | |
| | CGGGGUGGCAGCCGGGAAGAGGGGCUCCUCAGUUCCCAGCAGGGGCGGCU | |
| | GGCCGGGCGGGGGCUGCCCCCCACCUCCCUCCCAGACGGGGCGGCUGCUG | |
| | GGCAGAGACGCUCCUCACUUCCCAGACAGGGCGGCUGCCGGGCAGAGGGG | |
| | CUCCUCACUUAUCAGACGGGGUGGCUGCCGGGCGGAGGGGCUCCUCACUU | |
| | CUCAGAUUGGGCGGCUGCUGGGCGGAGGGGCUCCUCACUUCUCAGAUGAG | |
| | GUGGCCGGCAGAGAUGCUCCUCACCUCCCAGAUGGAGUCGUGGCCGGGCA | |
| | GAGGCGCUCCUCACAUCCCAGACGGGGCGGCAGGGCAGAGGCGCUCCCCA | |
| | CAUCUCAGACGAUGGGCGGCCGGGCAGAGACGCUCCUCGCUUCCUAGACG | |
| | GGAUGGCAGCCGGAAAGAGGCGCUCCUCACUUCCCAGACUGGGCAGCCGG | |
| | GCAGAGGGUCUCCUCACAUCCCAGACGAUGGGCGGCCAGGCAGAGACGCU | |
| | CCUCACUUCCCAGAUGGGGCGGCGGCCGGGCAGAGGCUGCAAUCUCGACA | |
| | CUUUGGGAGGCUAACGCAGGCGGCUGGGAGGUGGAGGUUGUAGCUAGCCG | |
| | AGAUCACGCCACUGCACUCCAGCCUGGGCAACAUUGAGCAAUGAGUGAAC | |
| | GAGACUCCGUCUGCAAUCCCGGCGCCUCGGGAGGCCGAGGCUGGCAGAUC | |
| | ACUCGCGGUUAGGAGCUGGAGACCAGCCCAGCCAACACAGCGAAACCUCG | |
| | UCUCCACCAAAAAAAUAUGAAAACCAGUCAGGCGUGGUGGCACGUGCCUG | |
| | CAAUGGCAGGCACUUGGCAGGCUGAGGCAGGAGAAUCAGGCAGGGAGGUU | |
| | GCAGUGAGCCGAGAUGGCAGCAGUACAGUCCAGCUUCGGCUCGGCAUUAG | |
| | AGGGAGACCGUGAGGAGAGGGAGACUGUGGGGAGAGGGAGAGGGAGAGGG | |
| | AGAGCAUCUAUAGAUAUUUCAAUUGUACUGGCUCUUGAUAUUUUUAGUAA | |
| | GAGUUUUCAUGUGAGGAAGUACUCAAGUUUGAAAAAACCUCUUUAUAAAU | |
| | CCAAAGACUUAGAAGGAGUUUCUAAUACAUAAUACAAAUGCCAACAAUUA | |
| | AGCAAUUCGAGGAAUUUUCUUACUGACCUUCCUAUUUAUUUAAAAUUAAU | |
| | AUAAAAAUUAGUCUUCCUGAUUUCUUCAUGGCUGUGCUUGAUUGCAUAAA | |
| | GUUGCUUUUACCUGGCCAUCUUUUAACAUUUUGUUUUUUAUUUGGAGUUG | |
| | CUAAAUUAAAGGAAGGAAGCUGUCACAAAUUGCUAAAAAUAAUACAUUGA | |
| | ACUAUAAAUAUGAAUCAUUUAGAUUCCAGUAUAUUUAUUUAUAUACCACC | |
| | CUUUUUCUGAAAUAAUUUGAAGAAGCUUAUUACUUUAUGUACAGAAUUUU | |
| | UUUUAUGAAGACCAUAAUGAGUACAGUGAACACAGCUGUAAUUACUAUUC | |
| | CAGCCCUGAAAGCCACUGUGAUGAAGUCAUGGAAUUAUGAUCUCUUCUAA | |
| | GCUUAUAAUUGUGAGCAAACAUAUGUACAAGUUUAUAUUACUGCAGUGGG | |
| | AUCCUCAGAAAGAAUCACAUUCUGGAAACAUUUAAGACAAAAUAAGCCUU | |
| | UCUGAUCUGCUAAUAAAGUAAACAAUCUUGAUUUAAAAAGAAUAAAUCAU | |
| | GUGUUAGGGACAAAAAUGUGAAGUUCUUUGUGUGAGAUCACAGCUCAGUG | |
| | CUCUCUUCAAAAACAAAAAGUCAUGCAGUUGUUUUUAUUGUUUAAAUAUA | |
| | AAUAAUUCACGUUCCAAAAAUGUCUCCUCAGGCUAACUCAGUAUCAUUUU | |
| | AAGGUAUUUUUUUUUAAGUUUACACUUGACCUGAAUCUUGUCUCUCAAGC | |
| | AGACAGGACAUGUUUUCUAGAAUAAUUGGCACAUUAAUAAUUAGCCAACC | |
| | CUGGGGCACAGGGAGGAAAGAAAACAUUUCAGGGCUAUUAGACACCAAAC | |
| | ACCACUUUCAAACGGGGCUGUACCUGGUGAGAAAGGGGGAUGGCCAUCCA | |
| | AGUGUCCACACUUGGAGAUUCUGCAAAGAGGCUUCCCCUUGCAAUGAUUC | |
| | UUUAUGCAGCCCAUAUUUUUCUGUGAGAAGUGGCAAGACAGAAAUGAAAG | |
| | CUGUGAAUUGAUCUGCCUGCUUAGUAAGCCAAGCUUAUAAAAGAAAAAAA | |
| | UUUGCUCAAGUUUCCUGACCUUGUCACCUUGUUUAAGAGACUGAAAGAAC | |
| | CUGACCUUUCCUUCUACCAUUUUGUCUGCUUCUGCAACUUGGCAUGAAUU | |
| | GUGAUUUGGAAUAGAGUUAAAAUCUCUUUUGGUGUUAGACUUAUUCAAGG | |
| | AAAAAUAUAUCCAAGGAUAUAUAAUUCUGAACUUCCAAGAAAAAAUCCUA | |
| | AAUGCAGCAAGUAAUGCAUUUUAAAGGAAACGUGAAAGUAUAAUUUGUGU | |
| | UAAAUUGUUAAAGGGUUUUAAAACAUUAAAAUUCAUUUAUUAAAAUAACU | |
| | UGCAUUUUACAUGUAUUGUAGAAAACCUGAAAACUCUAGAAAAAUAUAAA | |
| | GUAAAACAAAAGCAUCCAUACUUUUGUUAUCCAAAAAAUGCUAUUAAUCU | |
| | UUUAGUGUUUUUCCUAAAUAUAUAUAAUAACAGGCACUACAUUUAAACAU | |
| | AAUUUUUAUACAUUCAAUAGUUUUGUCUAUGGCCAUGAUAAUCUUAGAAU | |
| | AUCCGAAAGAGCCAGCAUAAUCUGUAAAGUUGCUGAGUGUCUAUAAUAAU | |
| | AUAGAAUAAAUGACAUCAAGAAAUAUAUUGGCUCAGGGGAUAUCUGCAUU | |
| | AUUUAAAACUCCUUCGAACAACCAUGUGAAUGAGCUUGGAAGCUGAUUCC | |
| | CCCUCAGUCCAGCCUUCAGAUGAGGCCUCAGCCUUGGCUAGCUGCUUGAC | |
| | UGUAACCUUAUGAAAGACCCCCAAGCUGGAGGCAUCCAGCUAAGCCACAU | |
| | CUGGAAUUCUCAACACACAGAAACAGUGACAUAAUGUUUGUCAUUUUCAA | |
| | CCACUGAGCUUUGAAAUAAUUUGUUAUGGAACAAUAGGUAAUUAGGUUAU | |
| | AGCAUACAAUAAUUAAAUGGACUUUGGUCAUUACACAAGCUAUGCCACUC | |
| | AGUUUACUACAAUGUUCAUCAAAUCACUUAACUUCUCUGGUUUGUAGUUU | |
| | GCUUACUUGUGGGAUUUGGCCAGAUUAGUGCUUCUCAGUCUUCAGUCAUU | |
| | UAUUUAUUAAUAUUUUCUAUACCUACUUGCAAAUUGUAGUGUUAUUUACU | |
| | GAAUUCUUCAAGUUUUAUUAUGAUGCAAAAAUUACUUGAAGCUAAUUGGG | |
| | CCAUUCAGCAAACAUGUCUUCAGUAAAUAUUGGUAGUCUUCCAGUAGUUA | |
| | UAUGUUGGUGAAGGAUAUUUUCCUCUUUCUGACAACUUGUUUUUAUCAGA | |
| | UGAUAUAUUACAGUGAGUGAAAGUCUCAGACUAAAUUCUGUCAAAUGUAU | |
| | GAACAUUUACUGUAUUUCACCAAAACUAAGAUAUCAUCUACUUCAAGAUA | |
| | CACCAUAAUAUUAUGGAACAGCAAGGGUGAAAGAAACACUGCAAAUCAUA | |
| | AUUAGAAAAUGUAAGACAUAUCCAAUUCCAGAUAUGUUAAAAUGUGAGAA | |
| | AAAAGUGUGUGCUUUAAGAUUAAAGAAAUAAGAUAUUAGCAACUAAGCAC | |
| | CAAAAUAUGUCAUCAUCCAUUCUAUUCAGUACUUUUGAAGUUACACUUUU | |
| | GACCUAAGGACACGAGCCCUAGCAAGAAAGUUUACUCCAAGAGGGGUAUC | |
| | CCACAGUUCUGAUGCCAGAAACAGCCGUCUUUGUAAUGAGAUCAGGCUAU | |
| | AAUGUUCUCCAUGCAAUGGAAGAAUGGGGGAAGAAUUGGCUCUCAUCUUA | |
| | AGUGCUCCUGAUCUUGUGUGCUACACUUGGCUUCUCAGGGUUUAUGCAAG | |
| | GGUGGUGGAGUCUUCACAGUAUUCCCAACUCACCUAUUUUAAAGAACACA | |
| | CAUUUAAGCCAAUAAAGAUUAUUUCUAACAUACCUUAUGCUAAUUAGCAA | |
| | AGCCUUUGGUACAGCUUUGAUUAUGGACAUGCUAUCUUUUAAGUGUAGUU | |
| | CUCCUUAGAUGUUGAGUCCUGAUUAGUACUUCAAAUAUUAAUUAAUCAUU | |
| | CCUGAUAUAUAGAUUAGAAACAAGUACUUCAAAAUACACAUCCUGCUGUU | |
| | UAUAAUGAAGCAUUUUAAACUAAAUGAUCACAUCUAGUAUAAAAACACUU | |
| | AUUUUUUCCAAAGUACACUUAUAUAGUUAGGAAACUACAAGUUACUACUG | |
| | UAAAUGGGAAGUGAGCAAUAGUGCUAUAAAUAUAAUAGAAGCCACCUGUA | |
| | AAAAGGAACACAUACAUCAAAACAAUGCUUGGUGCCAUUGCCUAGUUAAG | |
| | GUUCUAAACUUGAGGCCAGCUCUCCCUUUGUUAAAGAAGGUAAGUAAUUG | |
| | AGAUUUGUUUCCUUGAAUUAAUCAGAGGAAAAAAAAACAAGGCAGUCAUU | |
| | UUCUUGUAAUGUUACUCCAAAUUAUUUAAUGCUCUGUAAGUGUACCACCA | |
| | GGGUCUGGGUCCUGUACUUUGUGAAAAACUAGAUUACAUGAUUUCAAAGU | |
| | CUCUGACAGGUCUAAUAUUUUUUGAGAUACAAUUUUUCUUGUGCUUCUUU | |
| | UGUAAAGCUGUGGGUGGAAAUGCAUGUCAUUUCAGAAAAUAGUGCAUAGG | |
| | UCAUUGGCAUCUUACACAGAUUUGUUGCUGUGAAUCCUUGAACCAGGAAA | |
| | GUAUUUAUUUUUCUAAUUAGCUCAUUAAUAAAUGAGAACAUUAUAAACAA | |
| | UUGUGUAUUUUUUCCUCAUGGUGCUCAUAUUAUGCACUUAUAAUAUGAAA | |
| | GACUUUUAGGCAAUAUUAAAAUGUAGACUCAAGCCUUCUUGUUUUAGAAU | |
| | CAGUAACAACAAUACAACAACAAAUAACUUAUUUGUCUGACAGGCACCAG | |
| | GCUUUAAUAAGCAUUUUCCACCCCCGCAUUCUACCUGCCAGUGAUGAUAC | |
| | UGCAGCAUCUGCUAUGAUUUGAUUUUUGGUACCACUUUGUCUUUAUUUCU | |
| | GGAUAUAGAGCUUACAUUCUUCAUUGGAUAAGUACUUCCAAGUGGACCUU | |
| | ACAUAGCAAUCACAAUGUCAGAUAAGCUAAAAAAGCCUGUUCUGAUAACC | |
| | AAUAGUUUGGUUUUCUAUCAUCUUGGAAACAUUCUUUGGCAGGGUAUCUG | |
| | CAUUCUUUUUGACUUAUUGCAGAAGAGAACCAUUCUCUAAGUAACUCUUA | |
| | CAGGAAAAUGAGAAAAAAUGUUUUAUGACUUCCAAGAGUGAAGUAAGUUC | |
| | UGGAAUCAGUCACCUGUGAACAAAUGUUAGCCAUACAUUUCUAAUAGUGG | |
| | GAUAGGGAGUUCAGGGACAAAUGCUUGACCAUUUCUUAUGUUUUUCCUCA | |
| | UUUGUUUUAAAGCUUAUCCUCAACGACACGUUUUAUUAGCCUGACUAAAA | |
| | GUUUGAGAGGGAUACCUAUUUUAAUUCUUUUUUAAAAUUGUCUAGCAGUC | |
| | UAGCUGAAUUUCUUUUAUACAGUUUGACCAAGAACUAAGAAGCCCAAGUA | |
| | UCAGUAUCUCUAUUACAGAGUUUAUCAAUUGGUGUCUCCUGCCAAAAAUU | |
| | CUGAUCUCCAAUAGUCUUAUAUUUUAUUUUAAUAUUAACUUCAAUAUUUC | |
| | AGUUAACUUGAAAACUUCUGAUAUUUAAUAUCAAAACUAGUUUUUUUGCU | |
| | UAUCUUAAAUAUUAUAGUAAUCAUCCCACAAGUGGUUUUUUCUAGUACCC | |
| | UAACAACAUUAAUAACUAAAAGUGUGUUGUAUUAUAGACAAGAUUUAAAA | |
| | GCACAAUUACAACUGAAAGUAAAUUAGCAAUUACUUGUUGAAAGUGUCUU | |
| | UAAUGCUGUUCUGACUCCCUAGUAGCACUUAUUCACUUCUUUUUAUUGAU | |
| | UUUCUAUGCUUCCAAACUUUGCUUCCAUUUAUCAAUAUUUAAAUAUGCUA | |
| | UGUCUCACUCUCAUGGGGGCUAAUGUUGUAGUUUAACCAUCUGCAAGGUA | |
| | UUUCUUAUUGACAGCUAACAGCUACUAUUUUCCUCAAAGGCAACAAUGCU | |
| | AAUUAACAACUGUCUUUUAUCCAAUCCAGAGCAGUGACUGACAGUGACAG | |
| | UUUUGGCACUGAGGCAGGAAAGUGAAAAAAAGAUUUUUGUUAUAAUUUGU | |
| | AUUUUUUUUUUGGUAUGCGUCAAACCACACCAUGCAGAUAGCUAUGUAUG | |
| | GCAUAGAUUUCUAUCUAAAGGAGAGUAUAAUUUUCAUAUAGUUAUGCUUU | |
| | UGGUUCACUCUGCUAACAAAGCUUUUCCUUUCAAAAGAAUAGGUUUCUCA | |
| | CUGAGGUAUGGACAUGCCAAGUCCGAAAUUUAAAAUCUAAAACAUUCUGU | |
| | AUUAUCUGAGAACAAAUAAAGCUUUGGAAAAAUUUAUCUGAUGCAAAAUU | |
| | ACUAGACUGUUUUUUUCAUGGUGCCCAAAUAUAUUUUUCUUUAAACAUUU | |
| | AUCAACUAAUCAUUUUGUAGUUUUAGAAAAAUCAACAUUUAUUUAGAAGA | |
| | ACAUAUAGGCUAUUAAAACCAGUCAUGACAGGAAUGAUAAUCUUGGAAGG | |
| | UGAUAUGCAUAUCCAUUCCAGUGGUUUUAAUGCUGCCACAAAUGUUUGAU | |
| | UUUUAUUUAUUUAUUUAUUUAUUUUUUAUUUAAGUUAUAGGGUACAUGUG | |
| | CACAACAUGCAGGUUUGUUACAUAUGUAUACAUGUGCCACGUUGGUGUGC | |
| | UGCACCCAUUAACUCGUCAUUUACAUUAGGUAUAUCUCCUAAUGCUUUCC | |
| | CUCCCCCCUCCCCCUACCCCACGACAGGCCCCGGUGUGUGAUGUUCCCCU | |
| | UCCUGUGUCCAAGUGUUCUCAUUGUUCAAUUCCAACCUAUGAGUGAGAAU | |
| | AUGCGGUGUUUGGUUUUUUGUCCUUGCAAUAAUUUGCUGAGAAUGAUGGU | |
| | UUCCAGCUUCAUCCAUGUCCCUACAAAGGACAUGAACUCAUCCUUUUUUA | |
| | UAGCUGCAAAGUAUUCCAUGGUGUAUAUGUGCCACAUUUUCUUAAUCCAG | |
| | UCUAUCAUUGAUGGACAUUUGGGCUGGUUUCAAGUCUUUGCUAUUGUGAA | |
| | UAGUGCUGCAAUAAACAUAUGUGUGCAUGUGCCUUUAUAGCAGCAUGAUU | |
| | UAUAAUCCUUUGGGUAUAUACCCAGUAAUGGGAUGGCUGGGUCAAAUGGU | |
| | AUUUCUAGUUCUAGAUCCUUGAGGAAUUGCCACACUGACUUCCACAAUGG | |
| | UUGAAGUAGUUUACAGUCCCACCAGCAGUGUAAAAGUGUUCCUAUUUCUC | |
| | CACAUCCUCUCCAGCACCUGUUGUUUCCUGACUUUUUAAUGAUCGCCAUU | |
| | CUAACUAAUUAAAUGAAACAGCUUCUGCACAGCAAAAGAAACUACCAUCA | |
| | GAGUGAACAGGCAACCUACAGAAUGGGAGAAAAUUUUUGCAAUCUACUCA | |
| | UCUGACAAAGGGCUAAUAUCCAGAAUCAACAAAGAACUCAAACAAAUUUA | |
| | CAAGAAUAAAACAAACAACCCCAUCAAAAAGUGGGCAAAGGAUAUGAACA | |
| | GACACUUCUCAAAAGAAGACAUGUAUGCGUCCAACAGACACAUGAAAACA | |
| | UGCUCAUCAUCACUGGCCAUCAGAGAAAUGCAAAUCAAAACCACAGUGAG | |
| | AUACCAUUUCACAAAUGUUUGAUUUUUGCAAUCCAUGUGAUUUGUUUAGC | |
| | UCACAUUUUUUCUUGAUUCUUACAUUGAGAAAUGCAACGGGUAAACAUUG | |
| | AAACCUGUACAAAUGGUACCAGCUUGACAACUGCAUGGUUUUAUAUGCAA | |
| | AAACAAUGGAUUGUUGGGUAUUUAUAGAUUGCAUUCCAGGUAUGCAGUUA | |
| | CAUUUAUUAAUGCACAGUAUUUGUGUUUUUAACUAAAUGUUUUAAGUGGU | |
| | UUUUAACUUUUAUUUCACUUGUCCAGUGACUUCUGUUGGUUUUGAAGUAU | |
| | AACCAAUGAAUGUAUUCAGGAUGGAGGGGCCUUACUGAGGGUUAGAACAG | |
| | AUGCUGUAAAGAUCUAGUUAGCAACAUGGAUCCUACAGUCAAGCAACCUA | |
| | ACUCUGUCUCCACUAUUCUCUUAUGAGAGUCAUUUGACUUCAGCAGGCUU | |
| | AGCUUAUAAACUGGGAUUAUAAAAGACCUGACUGUGAUAAUCAGAUACGU | |
| | AAAGCAAAUAACACUGUGUCUGGCAUAUAGAAGGUGCACAACUAAUGCUA | |
| | AGUUUUACAUAGUUUUUAAUCUUAGGGAAUUAAAUUGUCCAGGAGAUGUU | |
| | CAGGAUUGGAGGGAUGGUGGUUAGUAUAGUGCUAGAUAAAAUUAAUGGUA | |
| | AUAAUUUGUUGUAUUGACAUGAAUUCUGUAUAUAUUUUCUUAGGCCGAUU | |
| | UACUCUUUCAGAAAUGUUUUAUUAUUUUAGCAAGACCGGAUUAAGGUAUA | |
| | GUGAUGCAGUGGAAAGAGCACUGGGCCUUAGAAUAAGGGGAUUUCCUUUC | |
| | UAGCCUUGGCUUUGCCAUUUAUUUUCUGGAAAUGAGAGUGGCCCAGUGAA | |
| | AGGUCCAUGGGGACAUUUGACAUAGGAUGGGACAACUGACCUAGUGAGCU | |
| | UAUCUGUUUACCUCUCUUUUUCACCUCUGUUGGUCUGUAUCUUUCAGUGU | |
| | CAGAAAAAUACAGGUAUAACUCUGCAACAAGGGACAUUUAAUUAGCAAGC | |
| | CUCCCUUGUUAGAACCUCGCUAAAUUAAUUAUUGAUCUUGUUUUAGUAUA | |
| | GAUUCUUCCCUGUUGCCAUGCCACAAUAAUUGCAGCAAAGUUGUGGUUAG | |
| | CUGGCUCUCGGACACUUUGGAACUGCUCUCCAGCUUUUAAAGUUGAAUAA | |
| | AUGACAUAUAAGAGCUUUCCACUCUCCUUAAGUUCCACUGUAUUUUUACU | |
| | CAGACACAACAGUGGCCAUUUGGGGCCAGAGAGCCACAAAUGCUCCUGAA | |
| | AUUAUACGGUUCUCCAAAAGCAAAAUAAAACAAAAUUUUAAAAUUAGCAA | |
| | ACCGUCUUCUUCCACCCACCCCCCAAACAAUUCUGAAAGCCAUGUUAAAA | |
| | UGUACCCUGUAAGCCUUCCUAUAAGCCUUAGUUCUUCAGUUGCCUUCCUU | |
| | CAGGCAAGAGAGGUGUCCCACAUGGGGUCUGAGCUUUAACACCACAGAUU | |
| | CCAUGAAACCUGUUCUUUGAUUAUCUCCUCUUUAAGGAAUGGGAAUAUGA | |
| | UGUUGGAUUCAGGGUACCUGUCUCACUCUUAUUGCCACAUCUCAAACACU | |
| | UUCUUCAUUUGAGUGACUCCCAGAGGCAGUCCUUUAAAUCUUGAUGCAUU | |
| | AUAUGCCAGCCUCCCUGGGCCUUAUGGGGGUCCCAAUUCACAUCUGGUUA | |
| | UCUUUGACCUUUAUCUUGGAAUUCUUCCUUCUUUUUAAUUCAUCCCACAC | |
| | UUCUUAAAAUGUUAAACGGCUAAUGUUGUAUGUUUCAUGAAAACAUUCUA | |
| | AUGGGACUGAUGAUAUUCACCUAUUAUUGGAGAAUGUGUCAUUUUUGUCA | |
| | GUGACCUUUUUAGGAGAGUGCCAGUGUGUUUGCUUUCUUUCUUUUUUUUU | |
| | UUUGUAUUUUGCAAUCCCGUGGUAUUAAUUUUUAAGUUUUAAAUUGAAGU | |
| | ACAUUAUACAAACCUACAAGAAGGGUACAGCUUAAUAAGGAAGAUCACAU | |
| | CCAUGUAAUCGCUACCCUGAUCAAGAGGUUGGCCACCUCUUUUAUCAAUU | |
| | AUCCACUUUUGACCAGAAAUAUAGUUAGAGUCUCACCUGGUUGAACAACU | |
| | GAAUCCAAAUUAUCUUGAAUAAUGAGAAUUUCUAGUGUUGUAACUUGAGG | |
| | CUUUGCCCAUGGCUUUGUUUUAUUAAACAUGUUUAUUGAUGACUUAGAUA | |
| | AGGCCAUGGAAGGCAAGCUUAUCAAACUUACGAUUGAGGCAGAGGGAAAA | |
| | AGGAAGUCUCCCUUUGCUUUCUAAUUGCAGAGAUUGUCCUCUUCUCCCUC | |
| | CACUUCACUAUUAUUCUUCUUUUUAGUUCAGGAAGUGGGGAGGCAGAGAA | |
| | AAUGAGAGAUAAUAUUUCUUCUAAUGGCAUUUUAGGGAUAGUCAACUAUU | |
| | UGCCUAUUAAAAGCUCGUUCUUCUUAACAGUCAUUUUGUGUCUUUUACUC | |
| | UUUUGUAUGAUUAUAAGAUUCUUUGUGAGGAUGAGCCAGUUUUAUAAAGA | |
| | UUCCCAGGGGGUACAGCAUUGGCGAUUCAUUCUAAGAGAAAAUAAAUGAA | |
| | AUUGACUUGGGAGAGUAUUACAUUUUUUCCUAAUUUGAGAAAACUCCCAG | |
| | AAGCAGUUCUGUUUCCUAAUACCUGGAUUCCACAUUUAUGGUAAAUUUAG | |
| | CAUCUUUCUGGCCCUGCUUGUCCUUAUUCCCCUGCUUUUAAUGUCUCCCA | |
| | UGCAGAUGACACUCCCAAAUAGAUGUUCUGGGUCUGCACUGAAAUUUCUA | |
| | CCUAGCAGCUCUUGGCUGCUGCAGUUGCUUGUUUCUCAGCAAAAGUUUCU | |
| | CCCGGAGUAGAGGAAGGCUGUAUUCCAUCACCUGGGAAGGUCUUUUCAUC | |
| | ACCUUUGCUCUUGUUAUUUUUUGUUCAGUUCCAAAAUAAUUUAUUUCUGU | |
| | UGCUGCCACCACUCUGACUACCUCCGAUAUCAGAGAAAAGGACCCAUGUC | |
| | UUCUAGAAGACAUAAGAUUUUAUUUCUCUUGAUAUGCAGAAAUCAGAGAC | |
| | CAUAUGUUAUUAAUUUUUAAAUUCCAAUUCCACUAAUAGUAAUUAAUACA | |
| | UGGUGAAUAAAUAAAUAGAAGUCCCAAUGUUGCUGAAUACACAUUUUAGA | |
| | CACUAUCCAAUUCUCUAAUAAAUAAGAAGAAAUAAGACUUUUACUAAUUC | |
| | AUUCAUUUCUUUUUAUGUUCAUUUUAUAAAUUCCACUUAUAGUUAUCUUC | |
| | ACUAAUAGAUGAGAAUAGAAACCAUAAAUUCAUUAAUAUGCAACUGACCA | |
| | GCCCAUUUCACUUGGAAUGCAUUUUGAGUUUACAGGCAGAUUCAUAUAUA | |
| | UCUAAAGCCUAAGCACUACUAAUAAAUUAAAAAGCCAGGAUAUCUACCAA | |
| | UUUAGGAGGAACUGGGAAUAUGUCCAGUUUUUUUCUUCUAUUUUUCUUUC | |
| | UCUCUCUCUCUGCACACUAUACAUGGGCAUCUUGGUCAGUCUUAUUCUAA | |
| | AGCAAAGAAUGAGCAGAAGUGCCCUCUCAGACCUUUCCUGGAAAAAUAGU | |
| | CAUUUAAAUGUCUGGAGUUAAAGGCCUUCUUUGUAUAGUAUACAGAAAGU | |
| | AAUUAGACUCAAAACCCUUUAGACAAUCAAUGCAGGUAUUAAAUGCAUUA | |
| | CAUAUCAGGAGUAUUAGGGAGAUAAAAAUAGAGCCAAAUCUUAUGAUGGA | |
| | GGAGGCCAACAAUCUCCCAUAGAAAAAAACUACAUGCCAGACAGUAGAUU | |
| | UUUUUGCCAAGACAGUCUCCUAUGUGGCACAGACUAUGAAAGCUAUGGUC | |
| | CUUCAGAGGAAGUAUAGGUAAUUUAACCAGGGAGUAAAGAUGAGUGACUA | |
| | GUGGAUGGGGAACCACUGAAAUUAAAAAAAUAUAUAUUUAUAAGACAACU | |
| | AGAGAGCUACUGUCAGAGAAACCAGCUAGAAAGUACAUUCAGUAAGAGAA | |
| | AAAUGUGUGGUAAAAAGCCCUUGAAUAGACUCAUAAUCAGGGCUGGCUUC | |
| | AUGGGCCUGAGACCUAUGGAGUCACACAAGAUUCCACACUAGAAGGGCCC | |
| | CAUACUUCAUUUAAUACUCUGCUGUAGCUAUCUUUAAAUUCUGAAUAAUU | |
| | UCUAAAUAGAAAACUCAACAUUUUCAUUUUAUACUGGGCCCUACAAAUUA | |
| | AGUAGCUUGUUCUGCUGGUCAUAUGGAAAUUAAUGAAGGUGACAUGAAAC | |
| | AAGAGCAUGAGAAAGGAUGAAGGGUUGUGGCUGUAUGACCAGAGAGUAAA | |
| | AAUCUAUAGGGUGGUAAAUUAGAAUUCCCACAUUACAGACAAUUCAGGAA | |
| | GAAUAGGAUUGAGGACUACUCUGAGCAGGCAAUCUUUUUGGAACUAUUGU | |
| | GUUGGAGUAUUGAAGGCCAGAGGCAUGUAACAGGGUCCAAAUAUGCAUGA | |
| | AAAAAAAUGGCGAAGACCAAGUCUCAAGUUAGAAGCUAGUUAGCCUAGGA | |
| | AGGCAUGCAUUCCAGGUAUUGGGACAGAGAAAAAUGGGCAGCCUAAAAUC | |
| | AAGUCACAGGACAAGUGGUUUGUAAGAGGAGAAGAAAGAAAGAAGGCUGA | |
| | AGAGGCCUCAGCAAUGGGCAUAAUGCCAAGCCUAGUGACUGCGGUCAUUG | |
| | UGUUUCACAGAAAUUUGUAAGAAAAUCUACCUUUUGUGGAAAGAUGAUGA | |
| | ACAGUUUUUAGUUUGCAUGGUGGUGGUGUUCAAGCAAAAAAUGUCCAAGA | |
| | UGUAAUUGGAGAAAAGAAUAUGGAGCUGCUAGAAGAGCUCAGGCACAGAG | |
| | ACAGAUUUAACAGUGAGAGCUAACAUUUGUUGGAGGCUCACCUUGCACCA | |
| | CACACCAUGUCGCAUUCUUCUCUUGUGGUAGAAAAAACACCAGAUGGUAU | |
| | AUAACAUCCUUUCAGAGGAAAAGGUAAUGUCUUAUAAGAGGAGAAGGGCU | |
| | UGUGAAAGCUAGACUUACAAGAAACCUUGUUAUUAAAAUUUGGGUCUAUA | |
| | UUUAAGCCCCUUCCUUCACUCACUCAAAAAAUACUUACUCAAGAUAUUAC | |
| | UACUCUUGUGUUUAAGAUGUUCAUUUUAGCUAUUGCUUUUUAUGUGUGAG | |
| | AGUUGAGAUAUCAAGAUGACAGAGAAACAAGAUACAGUGAGGUUGCCAUU | |
| | AUAAACUUUAGAAAUAAAUAAAAGAAAUUAGCCCCAUAAGUUUCAGAAAC | |
| | UCAAAUUAAGCUUAAUGACAGAUAGAUUAGUCAAGGUAUACUAGGGGGUA | |
| | GUAGAUAUUUUUCAUUUCUGCACAAUCAAAAAUGUUGAACAUCUUCCCUA | |
| | UGUGCUAGUAAUGUAUGAGGUCCAAAUUCUUAAGGUAGAAAACCAGAAAA | |
| | UUAGAAAUUUCAGCCUCUGGUAAGCUAGGAGUGACCAUGUGCUCUGGUGG | |
| | GAGUCCCUGGGAAGACCCAUUCUCUCAAAUAAAAUUUCAAAAAGAGAAGG | |
| | GUUUUACACUUUGCCCUUUAGCUAUUCUUUAUUCUGUUCUGCCUGAAAAU | |
| | CAGAUAUAUUGCCUUUCAGGGUCUCACCAAACCUAAGAGGUGCAACAUUC | |
| | UCUUUAUUAUGACAAAUGCUCUUCUAUGCUAAGUGUGGUAGAACAGGGAA | |
| | GAUGGAGGUAACUUAGGUCCUAGAUGGCAUCCUUACUUCAGCUCUGGACA | |
| | UCACGGAAUUUGAAAAAAAGAAAAAGCAAACAAACAAACAAAAAAUGAAG | |
| | CUGCUGUUGUUUGAGUUUUCUGUUCUUUGUAUCCCAAUGAAUAAUUUCUG | |
| | GUUAAUCAAUGGGGCAUAUCACAGAAUCUGAGGGCAAUUAUGUGAUUAGU | |
| | UCUCAAGAGCAUCCAGGACUCCAGUGAAAUCAGGACUCUGUCUCUCCAUU | |
| | UCCACUUUUCUUUCUACUUUGGCUUCAUUCUUUAGUUGCAGUAGAGUAGC | |
| | UUUUGUGGUUGAAAACAUGGCAACUCACACCUCCCAGUUUUAUGUAUUAG | |
| | AGCUCCUGCCACCAGAUGACUUCUUUGAUUUCAGGUCUCCAAAUCCAGAA | |
| | AAAUGGUUUCCUUGUCAUGGCUUAGGUCAGAUUUCAUUUCAGUAUCAAUC | |
| | AAUUUUGGCCAGAAGGUUGAAGUCUUUUAAGAAUUUAAUCAUUCCCAGAA | |
| | AAAGUAUAUAUAGAUGGAGAAAGGGCUGAGGAAGCUCUCAAAAGAAGGCA | |
| | UUGGAACUAGGGGCAUUCUGGGUACAUAAAACAAUAGCCCUCAAUUAUGA | |
| | UUUGUAUUACACAGGAGCAAACUGUAUUGUGAGUCUGAUUGCCCACUAUG | |
| | AACUACACAUUUUACACAGUUAAGAGAAAGAGUAAUCCUCUCAUCUUUUU | |
| | UUUUAAUUUUUAAUUUUUGUGGCUUAUUUUUAGUACCCAGCCUUAAUAGA | |
| | GUUGAGCAAAAUAGAGAUUACGUUUCCAUGACAUAAUAAAUUUUGGUAAU | |
| | UUCAGAAAGCAAAAAAUACUGGAAUCUUUUCAAUCCAAGUCGAUUGGAUA | |
| | CAUAGCAGUUCAAUUUGAACACAGCAGUUCAAUUUAUUUGUUAACAAAUU | |
| | CUGCAGUGUCUUCCUGUAAGAAUCUGUAAAAAUCCUCAUCAGCAUUUGAA | |
| | GAUGCACCCCCUCACUUUUGUAAUUGGUUAACAGAAGCUUCUAUCUUUUC | |
| | ACAUCCCUUUAGUGAUCUCACUGUUUACUCUUCAAGCUGUAUAGUGGCAG | |
| | CUGUUUAUAUGCUUGCAUACACAUGGUUUAUUGGAAUGUUCUCUUCAAAU | |
| | UGAAAUUAUUUAUGUUUCAAAAUUUAUAUACACAUACUAUCUAUGAAAAA | |
| | UCCUGCACAAUUGUGUAUUUUUUUUGCUGUGGAUACUGCAUAAAUAAAAU | |
| | UUAAAAUAAGAAAGAUGUUUCUCUUCUUUACAUUAUUACUCUAUCUAAGC | |
| | CUACUGAUAUUAGUUAAACAUUGUUAUUUUCUGGCAACGAUGUCUUUGAU | |
| | GUGUGACACAUUCUUGCUGGAAUCCAGCCUGUGGCUGAUUGUAUUUUCUA | |
| | GAAAGGGCUGCACUAAUACAUAGCCCAUCCCACCCACAUGCUCUUCUUGC | |
| | AAUGUGACAACAAUAAAUGACAUUGUCUAACCUAUGUUGGGAAUGAUAGU | |
| | CUCUGUCUUUGAAUCUGGUUGGAGUUUUGUAAAUGCUUGGACCAAUAGAA | |
| | UGUGACAGAAAUAAUGCUGUGUGCCUUCUGAGACUACAUCAUAAAAGAUG | |
| | AUGUGGCUUCUUCCUUGGUCUUUCUUGGGAUGUUUACCUUUGGGAUCUGG | |
| | CUACUAAUUUGUGGGGAAGGCUAGGCAACAUGGAGCGGCCAUGUAUAGCU | |
| | CUUCCAGGCUACAGCUGCAGCUAAAUUCUCAGCUGACAGCCAACAUCAUG | |
| | UGUCGGACAUGUGAGUAAAUGAUCUCAUUUUAUUCCAGACCUCAGCCUUC | |
| | AAGUUUUCUAGCUGAGGCUAGGUUAUUUCGUGCCACUUGCUCUGGGGGUA | |
| | UUUUUUUUUUCUCUUAAUACAACCAUAAUAAUGGAACAGAGUCCAUUCUG | |
| | UUUCUGAAAGACACUUAAGUGUAAAAAUAGUAAAAAUAAAUUAUCUCUUU | |
| | CUAAUAACAUUACAUCCUAUAUAAAAUAGAAAGCCUUUAUUCAGAUUACA | |
| | AUGAGCUAUUCUAAAGGGGAAUGUUUAGAUAUAGCUUUGGCUUGCUAACU | |
| | AUUAAAUUAUAAAAAAUUAUCUCAGCGAUCAUUUUCUAUGCAUUUAGCAU | |
| | GUCAGAGUUCAAAUAAUCUAAGAAAAAUACAUAGGAGAAACAAGACCUGA | |
| | GGAGAUGUUCCUGUGAUGGAACACUGAAACAGGAUACUGAUGGAGACAGG | |
| | GUUCUCUAAAAUUAUUUGAAAAUAAACCAGGUUUAAUAUCCUGCAUAGAA | |
| | AAAAGAGCCAUAAAAUAUGGCUUCUAUCACUGUACUACACUGUGUUUUUU | |
| | AAUUUUUUAGAAGAGUUAUUUAAAUUGCUAAUUUAAGACUUUAAAAUUUA | |
| | UAAAAUUUUAAAUUUUAUUUGUGAGGUGUUUAGUUUGCUUUCUGAAGAAU | |
| | UUCUUAAUUAGCAUGUCAUGCUAUGUAGGACACUUUAGUAUCCCUGAGAC | |
| | UGAAGCAGAUUUUCACAUUUGGAUUCUUAUCUAGCCAUAAUUUUUUGGAU | |
| | UGUUUUCAUAUUAAGCUUUACAUUUUCGAAUAUUUGUUGCUGCAUAUGUC | |
| | AAAUAAUUAGAGUCUUUUACUACCUUUGAGACUCUAAUACAAAUGAAGAA | |
| | UCUAAACAAGCAAUUAAACAAUAGCAGGAUAUUCAGCUGGAAACAAUUAA | |
| | GUACUGCCGAUUAGAAGCUCAAUCCUCUAGAAUAAACUCUUACACUAAGA | |
| | GCAAAGUUUAUAGCCACUCUACAAUUUAUUUAACACUUCCCAUCUCCUUC | |
| | AUUUAUAAACCACAUAUGUAUAUUUUCUUUCUUUCUUUUUUGAGACUGUC | |
| | UCACUCUGUAGCUCAAGCUGGAGGGCAGUGGUGUGAUCACGGCUCGCUUC | |
| | AGGCUCAACCUCCCAGGCUCCUGAUCCUCCUGCUUCAGCCUCUUGAGUAG | |
| | CUGUGACUACAAGUGUGCACCACCAUGCCUGCCUAAUUUUUUAUUGUUAU | |
| | UUUUGUAGAGACAGGGUCUUGCUAUGUUGCCCAGGUUGAUCUCGAACUCC | |
| | UGGGCUCAAGCAAUCCUCCUGCCUCAGCCUCUCAAAGUGCUGGGAUUACC | |
| | UGCAUGAGUCACUGUGCCCAGCCCCAUAUAUUUUCUUGGUAAAUGUGCAA | |
| | UACUCAGGUUUCCUUUCUGUCUAUCAGCCACUGGAUGCUUGAUUUAGUUA | |
| | UACAGAGAAUUGCACUGGCAAGCUGUUCAAAACCUCUUCUUAACUUUUUU | |
| | AAAGCAAAGGCAAACAGAAAAAGUAGGCGAGACAAGGGGAAAAAGAAAAA | |
| | AAAUCUCUCAGGAAAACUUCUGAAGGUAAAAACCACUCUGGGUCACAGGC | |
| | UUUGGUCACAACAGCUCAGUUAGGGACUUGUUCUUUCUUUCUAUCCCUUC | |
| | ACACACCAGGGGCAACAUUCUUCCUGGGACUUACUAUGCGCCACAAGAAA | |
| | CUCAUUAUUCGCCUUCACCAAAAUUUAAACUCUUCCCCUUUCUGCAUUUC | |
| | CUGCUUCAAUUAUAACUCAACCUACUAAUCAAAUGGCCAAACUAGGGAUA | |
| | AUCUUAGGCCCUUCCUUUUUCUCCACUAUCAAUCUAAUUUCUUUCCAAAU | |
| | CCUGCUGACCUAUCUCUGUAAUCGUUUAUCAAAUCUGCUUCUUCCCAUCU | |
| | CUGCUUGCCACUGCCCUAGCCUGAUCUAGAUACUUGUAGCAUUUGAUUGG | |
| | CUAUGUUACUGGUCCUGCUCUCUUAGAUAUGUCUCUACUCUGACAUCAGA | |
| | GGAAUGUAUAUAAAAUGCAAAUCAGAUGCUGUCAACCCACUGCUUAAAAA | |
| | UCAUUCAAAGCAUUCCAUUGCCUACAAGAUAAAGUAAAAUCUAUUUACGU | |
| | GACAUGCUGGAAUUUCUGUAGCCCUGUUUGUCUCUCUGUGUCCAUCUUUU | |
| | AAGUAUCCUUUUGGCUCUUCUUUUUCCUUUUCUUAACUUAGUAUCCUACA | |
| | UGGAUGCUGAAUUUCCUGUGACUCCCUCAAGCACCUUGAGUUUUCUGUCU | |
| | UUGUGCAUUUCUUUGUUUUCAUUCCAGCUCAGGCAACACCUGUUUCAGGA | |
| | AUGCUUCACUUCUAUUCUCUGCCAAAAUUUUCACUGACCAUUUCUUUCAU | |
| | AGUGCUUACUUUAUUAUAAUGAUAUUUUGUAUUCUUUAUAUUUUGUUUAG | |
| | AUGUUGUCUUCCUGAUUAGGAAUGUCCUUAAUUUUUGGAGCCAUGACAAA | |
| | UAUUUUUAAAUGAUGCCAUGGCUUUGUUUGUAUUGUGAUUUACAUAAGAU | |
| | UUCUCAUUUACAUAGUUAUCAAUGAUGUAACUAAAUCCAUGCUGAUAUGC | |
| | UUUAUAAACAACCUGUUAGAAUCCAUCAUGACUCAAACCAAAGUUGAGCC | |
| | CAAUUUCAUGGAAUUUUCUUCACCUUUUUUAUAGGAAACUUUUGUCUCCC | |
| | UUUCUUAUUUCUGUGAGAACCAUGGCAAAUUGUAAAUCUUUAUACAAUCA | |
| | GUACAAAUACUACACAGUCCAUAACUAUUUGUUGACCUGAAGUAAACCAG | |
| | AUUAAUAAAGCAUACACUCUGGAUUGAAUAAUCAUAAAGUCCUUAACCAA | |
| | ACUCAUUUCCUGAGCCUGGUUAUUAGAAUCUAAGCAUCCAAUAAAGGCUU | |
| | GCUUCAUCUAACUGAACAGGCAUAGAUUAAUUCUUUAUUUCUUAAAAAUA | |
| | AACAAAAAUGCAUUUUAUUUUUAGCAAGAUAGUUUUCACCAAUUGGGCUA | |
| | GAACAAUUUUUGAAAGUGAAGAUAAGAACUUCAAAGCCCCCACAGCCUCU | |
| | ACCAUCUGCAUUAGUUUCCUAUUGCUGUUGUAACAGCUAAACAUUUAGUA | |
| | GCUUAAAACUCCACAGAUUUAUUAUCAUAUAGUUCUGGAGGUCAGAAGUC | |
| | UGAAAUGGGUCCACAGGGCUACAUUUCUUCUGGAGGCUGUAAGGGAGAAU | |
| | UGCUUCUUGACUUUUCUAGCUUCUGGCUGCUGCCUUACUCUUUGGCUUGU | |
| | GGACAGGGAGAUGCAUCCUCACAUCUAUUCUGAUUCUGACUUUCCCAACU | |
| | CCCUCUUUUCUCUAUUAGGGACCCUUGUGAUUAUGUUUGGCUCACCUAGA | |
| | UAAUGCAGUAAUCCUCCUAUCUUGUUAUCUUUAACUGAAUCACAUCAGCA | |
| | AAACGUCUCCUUUGCCAUAUAAAGUAACAUAUUCACAGGUUCUGGGGAUU | |
| | GGAUUUCUUUGGGAAGCCAUUAUUCUACCUACCAUACCAUCCAUUUAUAU | |
| | UGCUAUGCAUGACAUCUUUUGUUUUUCAACUGAGAAACAACUGUACAUAU | |
| | GGGUUUGGAUGAGAAACUGAGCGAUUGAGAAAAAGUAUAGGAAAUGGAGU | |
| | AGAUUAUUGUAUUCCAUUAAACCCAGAGGGUAUUUAAGCUCCUAAAUUUG | |
| | GGAAAGAAUGGUCCUUAACUGGAGGAUAUUAAUUGUUGUUGAUUUGUUUU | |
| | GAAACUGGGUAAUUUAUAAAAAAUGAAAUUUAUUUCUUACAGUUCUGGAA | |
| | UCUGGGAAGUCCAAGGUUGAGAGCGUUUAUCUGGCAAGAGCUUUCUUGUU | |
| | GGUGGGGAUCCUCUGCAGAAUCCUGAGGCAGCACAGGACAUUACAUGGUG | |
| | AGGUGGGGCUAGAUGUGCUAGCUCAGAUCCUUCUUUCUCUUCUUAUAAAG | |
| | CCACCAAUCCUAUUUCCAUGAUAAAUUUUAAACGAGUUUGAAGGGGACAA | |
| | GUAUUCAAAUCAUAGCAUUCUGUCCCUGCCCCACCCCCAAGCCUAUGCCC | |
| | UGCUCACAUGCCACUCAGAAUUAUUCCAGUGAGGGCUCUCUGCAGUGGCU | |
| | UCCUCCUGAAACAAGUCUCUGCCUGGGCCACUAGGAGUUCAACAACAUCC | |
| | UUUGAAAUCUGGAUGGAGCUGCCAAAUCUUCACAGCUCUUUCUUUCUGCA | |
| | AGCUUGCAGAAUUAGCACCACAUGGAUGUUACCAAGGUUUACAAUUUAUA | |
| | CCUUCUGAAGCUGAAGCAUAAGGCAUACAUGGGACUUAUUUAGCCACAGC | |
| | UGGGGUAGCUGUGAAGCACUGCACUGUGGUACAGGAUUAGAAUCCCAAGG | |
| | UGGCCCUGGGCAGUGAUCUCAUGGAGAAUGUGAUGUCCAGUCUCUGGAAA | |
| | UUAUUUUGCUCUCCUAGGCCUCUUGACCUGUGAUGAAAGGGGCAACCUCA | |
| | AAGUUUUCUGAAAUGUCUUUGAGGUCUUUCUCCCAUUGUCUUGAGGUAGA | |
| | GCACCUAGCUCCCUUCUAUUCAUGCUAAUCUCUUUGGCAAAUGGUUGCUG | |
| | GGCUUGGUUUCUUCUCCUGAACAUACUUCUCUAUACUUUAAGUGUCAGAC | |
| | UGAGAGUUUUCCAAAGAAUUCUACUCUUUUUCCUUUUGGAUUAUAAAUUC | |
| | GGUCCUUAAAUUAUUCUUUUGCUCCCAAAUCUCAGCACAAGUGGUGAAAA | |
| | GUAACCAGGAAGCUUCUGUAUUUUCCUUAGAAAUUUCUUCCGCCAGAUAC | |
| | CCUAGUUUAUCAUUCUCAAGUUUGGCUUUCCACAAAACCUUCAGGCAUGG | |
| | AAACAACUCAGCCAAGUUCUUUGACAGUUUAUAACAAGGAUGGCCUUUAC | |
| | CCCAGAUUACAAUACGUUGUUCCUCAGUUCCAUCAAAGACCUCAUCAGAA | |
| | UGGCCUCUACUGUACAUAUUUCUAUCAGAAUUCUGGUCAUGACCACUUAA | |
| | CCAAGCUUAAGGUGUUCCAGACUUUCACUAAUCUUCUUGUCUUCUAUGUU | |
| | CUCACCAGAAUCUGUUUUUUUUUUUUUUUCUAGCCUGAUCCUUUAAAUUC | |
| | UUCUAGCCUCUCUCCAUUGCCCAGUUCCAAAGCUGCUUCCACAUUUUCAG | |
| | AUAUUCAUUCUUGGCAACAUCCACUUCUGAUACUAAUCUUCUGUCUUAGU | |
| | UUGUUCAUCGUUGCUUAUAACAGAAUACUUGAAACUGAAUAGUUUAUAAG | |
| | AAGUGAAAUUUAUUUAUUGUAGUUCUGAAGGCUGGGAAGUCCAAGGUUGA | |
| | GGGGGUGCAUCUGAUAAGAGCCUUCUUGCUGGUGGAGACCUGCUGUAGAG | |
| | UCCCAAAGUAGCAUAGAGUAUCACAUGGUGAGGGGGCUUAGUGUGCUAUC | |
| | UCAGGUCUCUCUUACACUUUUUAUAAAGCCACCAGUCCCACUUCUAGGAU | |
| | AAAUUUCAAAAUGAGUUUUGGAGGACACAUAUUAAAGUCAUAGCACUUGC | |
| | CUAUGAGGUCAUGAAAGGUCUGAAAUCAUCCUGCCUCUCCAGCCUCAUCU | |
| | UGUGUCCCUUCCCUCUUGAUUUUCAAGCUCUAUUAACUACACUGUCUCUG | |
| | UUCACAGAGAUUUAUAUAUCAAGUAUCGUUUUUCUGGAGUGCUUUUCAUU | |
| | UUAUAAUUCAGCUCAUUAACUCCUUCUGAUAUAUCACAUGGUUCAUUGAU | |
| | ACUUUGUUUUGACACAUUUCAAUUUGAAAUGUUAUGCUCACUUGUUGUAA | |
| | CUACUUUUUAACACGUGUUCAUUUAAAGAAAGAAUAACACAAGAGUCCCA | |
| | CUAUAGAAACUUCUAUUUAGUAUUGUACUGGAGAUUCUAGGAGAAAUUUU | |
| | UCUAUAAGGAUUAAAAACUCCAAACUCAUGUUGAAAUUUAUCAUAGGAGU | |
| | GGGACUGGUGGCUUUAUAAAAAGAGGAAUAGAGAUCUGAGCUAGCACACU | |
| | CAGCCCCUUCACCAAUGUGAUGCCCUAGGGCUACCAUGGGACUCUGUAGA | |
| | GGGUUCUCACCAGAAAGAAGGCUCUUACCAGAUUCAGCCUCUUCACCUUG | |
| | GACUUUCCAGCUUCCAGAACUAAAACAACAACAACAACAACAACAACAAC | |
| | GAAACCUAUGGAAAACCCAAGAGAAUUAUCAGACGAACUACUGCAAUUAA | |
| | UUAGAAAGUUUAGCAAGGUUGUGAGAAAUAAAAUCAAUACAUAAAAGCAA | |
| | AUUGCACUUUAUGUGCAGUUAGAUAAUUCAAUUUUAAAAGACCAUUUUUA | |
| | UGAUAACCAAAAAAUAUAAGCUUUAAUAAGUAAAUACUUAUUAGUAAGAA | |
| | UACUUAAAUUAAGAAUUUUGUUCAUCGAAAGAUACCAGUAACAUAGAGAA | |
| | GUAAAGCAAUUUUUAAAGACAGAACAUUGGAAAAAAGCCUUAGCAACCUA | |
| | CUCUCAAGUCUCAAGUACACAUCUAACAAACAGUCUGUUUACUUACAAAA | |
| | AUGUCUGAGUCUGUAUUUCCUUCUCUGAAAAAUAGGAUUUGAAAUAGACA | |
| | AUCUUGCAGUCCUCCAGCUGAAGUUCUUGGUUGUUAUAAGAUAUUCACUC | |
| | GUUGCAAACUUGUCUGUUUUGAUUUUUGAAAGGCAGACUAAGAUUCUUCU | |
| | UUAGAAGGACACAUUAUAUUCUGAUUAUUCUCUAUGAAUAUAAUGAAUUU | |
| | GAAGACCUCCAGGCAAUUUAUCAUAUUAGCAUAUAUGGACCUGUCUUGUU | |
| | UACUUAUAUCUUACUCAAUAUUUUCACAUUGGACCAUAAGUCAUUCACUG | |
| | UAACUUGCUACUUUCUGAUUCUGAUUUUUCCUGCAGCUUAAGAGGAAAUU | |
| | UAAAUAUAUAUAUUUAUUCUUACCUUGGAUUUAUAGUGAUGCUAAAUGGA | |
| | GGUAGUUUGAGAGGGGUGAAUUUAAGAAUGUGGCUAAAGAGUAUAGUGGG | |
| | AGGUUUAUUUCUGACACUAGAGGUAUUAUGGGAGGGGCUACCUAUGAUUA | |
| | UAAAAGAAAUAAAAUAUACAAAGCCCAAGAGAUAGUUAUCACAUUGAAGA | |
| | AUUUCUGCUUUACCAGCAAACUACUUUCUAUAACUGUCUCCAAGUCAUAA | |
| | AGCUUUGUUUAUGUGUAAUAUCUGAAAAACAAACUCUAUAUCAUGAAGCG | |
| | GUUUAACAUGCUGUUUGGUCUUUGUGAAGCAAAUUUGGAGUUUAGCUACA | |
| | AAAUUAUUGGAGGAUACUGUAAUUUAUAGUAACAAAAGCAUUUUAUCCUG | |
| | UGAUUUCAGGAAACCAAGAAAUUAUUUUGCAUACCACACUGCCACCCUGA | |
| | AUACAAAAUUUAAAAGUUAGCUGUAUGUUUAUGAAAUAUAAUACAUAUGA | |
| | CAAAGCAUAUCCUUCCUUAUUCAUCUCUGAAAUCUAUUAAAGUACAUAGA | |
| | AUAAAUGUAGAAAAGUAACAGCAAGUUGGAAAUAUAAUUUAGGUUUGCAG | |
| | ACAAUAAGUAAAUAUUUGAAUAAUUUUGAUAAAACAGGCCACGAUUUUAU | |
| | AGGUGCUUCUGUCAAGUUACUAAAUCAAAAUAUUAUGGAAUUCUUUCAGU | |
| | UAUUAAAAUUGCAUUCGAAUUUUUUAGAUGAAAAAAAGCAAGGUGACAGG | |
| | CUAUACAUCAGUUAAAUUGUGAGCAUUCUUUUCUAAUUUUCCCCAUAAAC | |
| | CAGAAAUAUUAAGUGUCAUGCUAACAUCUGUGGCCUGAACAUAAAGUUGA | |
| | CAAAAAUCAAACCUAAUGGCUUUUCCCACUGUAAAAUAAUGUCUAGUUUC | |
| | AAUCUGCAGUUUUUUUUUAAGUCUCAAGUGUCAAAGUAAUGUCUCAUGUU | |
| | UGUAACCACUUUGUGUUUUCACAUCAAAUAUAGUUUCACUAGAAUCUAAG | |
| | UUCUUUUUAAAAAGAAUUGGUUUAUGAUGACAUUUUGUUCUCAUAUGGUC | |
| | UCAAAUAUUCUUUUUGUCAAAUAAUCAGAAUGAUGAGGGUACUAGUAAUC | |
| | AUCUAAUAUAACAUUUUAGUUUUUGACAUGUAGAGAGAGAGAGCCCUUUU | |
| | UAUUCCAUAGGAUCUAAUUCAGUAGAAAAUGAAAACAAAUUCUCCAAAAG | |
| | UGGGUUCAAAGAUGUAGGUGGCUGUUGUAUAUAUUCAGGGAAGCUUCCUG | |
| | AUAGUAGUGGGAUACAACGUGUGCGGUUUAUCACAUACAUGUACAUGUAU | |
| | AUAACAAGAUUCUUACUAGACUUUUUGGUUAGACUUCCCUACAUUGAAGG | |
| | GGAUUGUAUUCACAAGGUCACAGUUUCUCUUCUCUGCAUAUAGUCAAAGC | |
| | UGCACUCUGAGACAUCUCUGAUUUCUGAUCCCAAGAAUAGCUUGUCCUUU | |
| | GCUUUUUACUUUCCAAUAGGGAAUGGAUGUCCUUUGACUCAGCUAAUCGC | |
| | AGUGGCCCUAUUUCUUCCAACUGUCCUGUUUGUGGUUACAUCAUCUCAAA | |
| | UUGCUGUGAGAUUCAACUCUCCAGUCUCUGUCACAUAUAUAUAAUACAGC | |
| | UCAGCUGAGUGGCAGCAAGCUUUGUUUCGGAACUGGCAACAUUCCAGGAG | |
| | UCUGGUUGUGUGCCUCGGGUAAAUUUUUGUCUUGCUAUUUGUUGUUGGUG | |
| | UGGUUUCUAGGUGACCCUAAUGAAAAUGUCCAGGAAAUUACAUGCGAUAU | |
| | UCCUGACAGUUCCAAGUCUAACAGCUGCUUAUUAGGAUAGACAUCUGACU | |
| | UUAUCUGGUGCCUAAUGAUUUUGUUGUGGUUUAGUAUUCCACCGACUGGA | |
| | UUGCUUAGGUGCUAUUCGUAACAGACACACAACUUAGUCUCUGCCUUCUG | |
| | GGAGCUGAUGAUCCCUAAUUCACAGAGCUUAAGAGGGCACAAGGCCAUCC | |
| | ACAGCAUGUCUAGAAAGCCAGAGAACUUUUCCUUAGCACUCUCAGCUUUU | |
| | GAAUUAAUUUCUCUUUUUUCUUCUUGGUGGCCCACACUCUAAUCUCACUU | |
| | UUUAUUCAUAUCCAAAAGAAUAAUUUACCUCAAACAACAUAAAGAACUAC | |
| | CUCUACUGAAGUCAUGUGAAUUUUAACACUGAAUUAAUCUAAAAAAUAGG | |
| | AAUGUUAUAAUAUUUGAGUUUAAAAUGUUAGUGACAGAGGAAUAAUUUUG | |
| | CACAAUAGAGUCUUCUCUUCAUUACUUACUAUUGGCCCAUGUGACCAUGA | |
| | AUCUAAAUAUGAUCCUUAAUACACAGAUUCACAUUAUGUUAAUGUGUGUA | |
| | UGUCCUUCUCAGUAACCCCUGACAGAACAAGUCAUUUCAUCAAGAGUCGG | |
| | GGAGGUUAUCAGCUGAUCGGUCUGUGAAUUAGUAAUCAUGCUCAGCUGAA | |
| | UGAUUAGACUGUUAUAAAAAGAAGUUAUCACAGUACCUGACUUUGGGUCA | |
| | AGGCAUGCAUUUGAUUAUUGGUAUAUUUUGGGUGUACAUGGCAUAUAGAA | |
| | UUCAGGAAAGAAUAUAUGGGAUUUUAAAUUUAUUUUAAUAUGUAAAAUAC | |
| | CGUAUUGUAUUAGUUAUCUACUGCUAUAUACAAAUUACCCCUAAACUUAG | |
| | UGAAUUAAAAUAACAAACAUUUAUUAAAUCACAAUUUCUGUGAGUCAGGG | |
| | AUUGGAGAGAAGUUAGCUGAGGUUCUGGUGUAGAGUUUCUCAGGCGUCUG | |
| | CAGUCCAGUUGUUGGCUGAGGCUAUAGUUAUCUGAAGGCUUGACAGGGGC | |
| | UAUCAGACCCAGUUCUAAGAUGUUUCACUCACAUGGUUCUUUACAGCAGU | |
| | CCUCAGUUCAUUGUCACAUGGGCCUCUUUAUAGGGUGGUUGAGUGUCCUG | |
| | AAAGCAUGGCAGCUGACUUUUUUCAAAGCAAGGGGUCUAAGAGAAAGAGC | |
| | AAGAACCCUCAAUGACUUUUAUGCCUCAUCAUAUUCCAUCAAUUCUGCCA | |
| | UAAUCUAUUGGUUUGAAGUUUAUUGUUAUAAAUCCAGCCCACAUUUCAGA | |
| | AGAGGGGAAUUCAACUCAACUUCUUGAAGUGAGGAGUAUGAUAUAAAGGA | |
| | GUUUGCAGAUAUAUUUUAAAACCACCACAUGCAUUGAAAGGAUAGAGAAA | |
| | UAAUGCUCAGGAAACUAUCCAACAUAAUUGAGCCACUAAGGAUCCAGAUU | |
| | UGUUUUGAAAGUUUUCUCCUCUGUUUCUCCUAUUACCUGGAAAAUAUCUU | |
| | ACCUUGGCUUCUGAAGCUAUUGAUAUAUAUCUAAUUGCUAUAGGUAUAUU | |
| | CCUAAUAAAGUCUAAACUAAUUACUAGGGAAACGGAACCCACAAAAUUAU | |
| | GUUUAUUUUUCCUUAAUUCUGGAGUAUUAAUGUUAAAUAUGACCCUCCUG | |
| | UCCCAGGAUGUCAGCAGAGGCUUCAAAGCUGGGAACACUAUAUUUUAAGU | |
| | GCUCUCUUGUUCUGAAGACCAGAGACAUUUCCAAAGGACUUGCUAAAGAG | |
| | UGGAAAUAAAAAUGAUCUUAUAAACUUUAGCCAAUGUGACAUGAGAUAAU | |
| | AAAUUUGGAGAAAUAGGAGGAAGAUGCUUUGAAAAGGAUUGUUGGCUUAC | |
| | UCAAGAGGAGACUGUUUUAUUCUAACUCAGCUAAGUGGUGGAGGAUGUCU | |
| | UCUUAUGAUGAAGGGAAACUGCCAUAUUGCCCCUGGUGGUUGUUGGCUGA | |
| | GCUGUGGAAAUGAGCUUGGGUGAUGCUGAUCUGUUUACCCUGGCUUGAAU | |
| | CCCUAUGUGCACAAGGAAAGCUACCUCGAGUAACUGCUAAAGAACAAGUA | |
| | AGGAGAGAAAGCUGCAGUGAGAGCAAAUAACUCCAUUAGUAGGAGGGCAA | |
| | GGGUACACUUACUGGAGCAAGAGAAGGCACUGUGGAAGGAAGUGAAAUAG | |
| | AACCCUUUAGAGAGGAUGUCUAGUGAGGCAAGGUGACCCAGCAAAUGAAG | |
| | GUUCUGUGGGGUGUCAUUAGAAAUGGGGACUGUGAAUAAGCCACUUGAAG | |
| | GCAUCCAGAAAAAAUGUUGCUCACUGGUAAAUGAUGUAAUGUUGAACGCU | |
| | UCUGUGGGAAAGCGUCUCCAGAGAACCCACCAAAACAUCCCUUGUGUGAG | |
| | AGAGCCAAUGUUUGGACAUCUUCCGUGACAGAGGAUUUCCAACAACCAGG | |
| | AGAAAAUACAAAUGAUGCCAUUAAUUUUAAACAGAUUUUUCCAAUUUAAC | |
| | AUUCAUCCCUGUUCCCAACCCACGUCUAGGGGGAGCUAGAGGCAGUGUAG | |
| | UGAGUCAGGAAUGAAGUUGGAAGAGAAAGGUGGAAACAUAGUAAAAUAUC | |
| | AUGAUACGCCCUUGCUUCCAAUUACUGUGAAACUGAGAAUCAGUUCUGAG | |
| | UGAGGCUGGGAAGUGGAAGCUUAAAAUUGAGUGAAAACUGAAUGCUUCGU | |
| | UGUAUAUUAAACUGGAAAGAAGAUGGAAAAGGAGACUAUUCUAAUGCCUG | |
| | AAAGUAAUCAGAAAGCUGUGGAAUCUAAGAUAUGGCCAAGAGGUAAGGGA | |
| | AGGAAAAUACGACAAAACAGGUUUGAGGACAGAUAUGAACAAAAUUAAAA | |
| | AAAAAUCCUACUUAAACUCUUUGGCCCAUUCAAUAAAUUUGUUGCAAAAG | |
| | AGCUUGUUGGGUACAAUGUUUUCGAGUUAACGUCCUGUGGCAUAUUGGAU | |
| | CUCUUCACAGAUGUUCAUCAAGUGAUGGUAAGUGGGAGAAGUUUAUCUCU | |
| | AUUCUCACCCAUCCUAUAAAUGCUGUGGAGUGAAGUGAUGAACUGAGAGA | |
| | CUCAUGUAAAAUAGUACUGAGGAUAAGCUGGCACUGAGCAAGAGGGAAGA | |
| | GGACUAGUAACUAUAUUGUCAAGUACUGGCAAUGAGAGACUGCAUGUACA | |
| | CUGGAGUGUACCAAACAUUGCCUUCCUGGUCAGAGAAAUGAGCAGAUCUG | |
| | AGUAGACAAUUUUUUUUCUUUUUUUUCUUUUUUUUCUUUUCUUUUUUUUU | |
| | UUUUUGAGAUGGAGUCUUGCUCUGUCACCCAGGCUGGAAUCCAGUGGCAU | |
| | GAUCUGGGCUUACCGCAACCUCCGCCUCCUGGGUUCAAGCAAUUCUCCUG | |
| | CCUCAGCCUCCCUAGUAGCUGGGAUUACAGGCGCCUGCCACCACACCUGG | |
| | CUAAUUUUUGUAUUUUUAGUAGAGACAGGGUUUCACUAUUUUGGCUGGGC | |
| | UGGUCUCCAGCUCCUGACCUCGUGAUUCGCCCAUCUCGGCCUCCCAAAGU | |
| | GCUGGGAUUACAGGCCUGAGCCAACAUGCCUGGCCUGAGUAGACAUUUUA | |
| | ACAGGCGGUGACAAGUGAACAGGCAACACUGAAUGCUUUUCUAGACACCA | |
| | UAAGAAAUAAUUGCACUGUGGCUAUUUUUUAUUUAUUUGGGAAUUAUUUG | |
| | GAAUCUUUUAAUCUCUUCAGUUGGACUACUGCAAACUGAUGAUAUUUGAA | |
| | AGUGCACCUGCAACCACUUUUUUUUUUUUGAGAUGGAGUCUUGCUUUGUU | |
| | GCCCAGGCUGGAGUGCAGUGGCGCGAUCUUGACUCACUGUAACCUCCACC | |
| | UCCUGGGUUCAAGGAAUUCUCCUAUCUCAGCCUUCCAGGUAGGUGGGAUU | |
| | AUAGGUAUGUGCCACCAUGCCCGGCUAAUUUUUGUAUUUUUAGUAGAGAC | |
| | AGGGUUUCCCCAUGUUGGCCAGGCUGGUCUCAAACUCCUGGUCUCAGGUG | |
| | AUCUACCCGCCUCGGCCUCCCAAAGUGCUGGGAUUGCAGGCAUGAGCCAC | |
| | UGCGCCUGGUGCGAACCACUUUUGUACAUAACUAAAGGACUGAAGUCAAA | |
| | GGAUGUCCACAGGGAAAAUAUUGAGUGAAAAUAAUAAUAAUAAUAUAUAC | |
| | AACAGUUCAGUAUUGUUCUAAAUGUUUUACAUACAUUAACUCAUUUGUUU | |
| | GGAUACACUUGCCUUGCCCUAUCAUUGGCAAUGAUUUUCACAAAUUUUUA | |
| | AUAUACCUGACAUUAAGCAUUUUUAUAUUUGUAAUCUGCCAUAGACAUCC | |
| | UAUUUAAAUUUAGCUAGUUAAGAUUGCCUUAUUGGUGAGCACCAGGUGCG | |
| | GCGUGGGGCAGGGCAGGGUCGUCAUGGCGGAGUUGCAGCAGCUGCGGGUG | |
| | CAGGAGACGGUGGACUCCAUGGUGAAGAGUCUAGAGAGAGAACAUCCAGA | |
| | AGAUGCAGAGUCUUAUGUUCCCGUGCAGCACCAGCUGUUGUGAGGACAGC | |
| | UAGGCAUCCAUGCAGUAAGUGCACCAGUGCAUCGAGCGCUGCCAUGCACC | |
| | UCUGGCUCAAGUCCAGGCCUUGGUCACCAGUAAGUUGGAGAAGUUCCAUG | |
| | ACCGCCAGGCCUGGUGCACCAAACAUUGCAACGACAAAGCCAAAGAUUCA | |
| | AUAGAUGCUGGGAGUAAGGAGCUUCAGGGGAAGCGGUAGCUGGACUGUCG | |
| | UGUGACCAAGUGUGUGGAUGACCACAUGCACCUCAUCCCAACCAUGACCA | |
| | AGAAGAAGGAGGCUCUCUUACCCAUUGGGAAAUAGAAGUCCUUGCCAGUG | |
| | GCCAUCGGGACUGAGGGCAAGAAUAUAUUUUUUAAUAAGGAAUUGGGAAU | |
| | UUCAGUAUUUUAAGCAAAGUUUAUGAAUGAAGAAAUUAAGGAUGGCAACA | |
| | AGUGUAAGGCAUAUGUCACUUGCCUCCGGACACUGGUUCUUUCAUGUUUC | |
| | AGUCCUAAAAAGUGAAAUAGGAAAAAGUGGUGCUAAAUUGCAUCGGAGAU | |
| | AUUACAGGAAGUUUUAGAGCUUAUGUUCCUGUGGCUAGUGCUUGUCCUGG | |
| | CCGUAAGGAUGUUGCCUGUAAUAAGUCAGAGCCCUCCAAGGUACCAGACU | |
| | CUUCUUACUACACAGGUACCAAUAGGCUGGAAGGUUAGACCUGAUGGAGU | |
| | UUGAGGAGAGAUAUUUUCUCUUUGUUGCCAACAUCCUGUUUACCAGAAGG | |
| | GUCAUCACACCAUUUUCUGUAAGCUGUGAAACAAAAUCCAAGAGGUCAAU | |
| | CACUUAGAAGGGAAAAACAAAUUUCUGGGUCUUAGUUUUCUUGAUUUUGU | |
| | GUAAUUUAUACAAUGGUAUACAAAUUGAUUUUAAGAUGUGGAAUUGGGAG | |
| | GGAGAGUAGUUUGGAUAAGAACUUUGAAGAUCCUUUUGGAUCCCCAUUUC | |
| | UGGUCAUCGAUAUGUAAAUAUACAUUUCUUAAUAUUAUUACAUGCUGUGU | |
| | CUUUCAACCUGGAGACCGUGCAAAAACAUAAGAGGUGACGACACACUAAU | |
| | UGUGGGAAGCAGAGCUUCCCUCUUACUGGCUGAUGGGCCCUGAGGUUGUG | |
| | UGUAGCAAAAUGACAGGACGAAUCUUGCAGUAACACUUUCCCCUUGAAGA | |
| | GAAGGGGGUUUUGACUGUGAUAUAUAUUAGUAUCUAGGAAUGAAUAGUAA | |
| | AAGAGGAGCAAUUGGCUACUUGCUUAUAAGGGAGUUAUGAAGUACUGGAU | |
| | UUGGAAAAACCUGGUUUUUAUAAAACAGAAUGGAAUGAAAGCCUAAACCU | |
| | AGCGUUGUUUCCUUAGCUCCCUGAAUUAACAGAGCCCAAUUGAGAUAAAC | |
| | CCCUGGCAACAGGAAAUUCAAGGGAAAAAAAGUAAACAACUCGGGCUAGG | |
| | AUGAGCUGACUCCCUUAGAGCAAAGGAGAGGCAGCCAGUCCCCAUUAUCA | |
| | AAUACCAUUUUUGCCCGGGGCUUUUGAAACUUGCAGUGUUUCAAAACUGG | |
| | CAAGGCACCUUAUUAUUUUGAUACCAACCUCAUUGUAUUUUCACCAACUU | |
| | AUUACUUGAAAUGAUAAUACAGCCUGUCCAUUUGCUGUUUUCAGGCUGUG | |
| | AUAUAUUUUCUUAGUAAUUUGGUUUUAAAAAUAAAUAAGGUUUAAUUCCC | |
| | CCCUCCCCGCCACAAAAAAGAUUGCCUUAUUCAUUACUAAAGAAUGAUAU | |
| | AUCACUUUUUAGAAGUAUGUGAUGUUUUCUAACUACAAUUUUUACAAACU | |
| | AGGCUUUUAGAAUUGCCAUUUAUGAUCAUUCUUGCAAUGCAAACUAAAAC | |
| | UAAAAUACGUUGCUGUUUAGGUUUAUAAAACAAGUGCCAUUCAUCAGGGA | |
| | AAAGAUAGAAUACGUCUUUUCUUUUUCUUUCUUCUUAGAAGAGUUUUGUA | |
| | UAAAGAACUUCUUUUAAAUAUUUGAGAUACUUUUCACCCAGAAGAGGUGU | |
| | UGUUUAAAUUGGGGUUUGUGACUAAUUUGUUUCAAUUAAAAAUACUUUAA | |
| | UAUCAUUAUCAAAUGCCUCUUAGAUGAUAUGAUCUCUGUUACCAUAUGUG | |
| | GUAGUUUGCUCUACAUACUAGCUAUUUAAAACAGAUGUAAGUAAAACAAG | |
| | AUUUGUUUGGGAGGAAUAGGGUUUCUCCAGAGUAAAGAAUACAGAGACCA | |
| | AAUGGAAACAUACUUGCUUCACUGCACAUGGUUUCUAUACUUGGCUGUGC | |
| | UGGCUUACCAUUUUAUGGUUACCAGAUUUACAUCCUUUGAAAUUAUGGAC | |
| | AUUGGAUCAAAUCCUCAUGUUGGAAAACACUCUAAGGUAACAUUAAAUGA | |
| | GCAUGUGAUUUGAAUAACCUACAAUUUUCACACAGGUUUUGAUGACCAAA | |
| | GUCAAAAUAUUUCCCAUAAAAUACUGUAAAUUUGCUAAAAUUUAUACAAA | |
| | GCUCCUACAGUGUAAUAAUACAAAGAAACUUUGUUUACUGAAAAAAUCUA | |
| | AAAUAUCUUUUUUUAUAUUUUAUUUUAAACAAUUUUUUAAGUUUGUAUUU | |
| | UUAUCUUAUUUAUUUAAGCUUGUUUUCUCUCUCUUUUUUAAAAUAAUUCU | |
| | AAAAAAACUAGAUACAAAUGCAGAGCGUGCAGGCUUGUUACAUAGGUAUA | |
| | CGUGUGCCAUGGUGGUUUGCUGCACCUAUUGACCCAUCCUCUAAGUUCCC | |
| | UCCUCUCCUCCUGUCACCUCCCACCCCCUAAAGGGCCUUGGUGUGUGUUG | |
| | UUCCCCUCCCUAUGUCCAUGUUUUCUCAUUGUUCAACUCCCACUUAUGAG | |
| | UAAGAACAUGGGGUAUUUGGUUUUCUGUUCCUCUGUUAGUUUGCUGAGGA | |
| | UGAUGGCUUCCAGCUUCAUCCAUCUCCCUGCAAAGGACAUGAUCUCAUUC | |
| | CUUUUUAUGACUGCAUAGUAUUCCAUGGUGUAUAUGUACCACAUUUUCUU | |
| | UAUCCUGUCUAUCAUUGAUGGGCAUUUGGGUUGGUUCCAUGUCUUUGCUA | |
| | UUGUAAAUAGUGCUGCAAUAAACAUACGUUUGCAUGUGUCUUUAUAGUAG | |
| | AAUGAUAUAUAUCUUCCUUUGAGUAUAUACCCAGUAAUGGGAUUGCUGGG | |
| | UCAAAUGGUAUUUCUGGUUCUAGACCUUGAGGAGUCUCCAUACUGUCUUC | |
| | CCCAAUGGUUGAACUCAUUUACAUUCCCACCAACAGAGUAAAAGCAUUCC | |
| | UAUUUCUCCACAGUCUCGCCAGCAUCUAUUGUUUCCUCACUUAAUAAUCA | |
| | CCAUUCUGACAGGCGUGAGAUGGUGUCUCAUUGUGGUUUUGAUUUGCAUU | |
| | UCUCUGAUGAUCAGUGAUGUUGAGCUUUUUUUCAUAUGUUUGUUGGAGAC | |
| | AUAAAUGUCUUCUUUUGAGAAGUGUCUGUUGAUAUCCUUUACCCACUUUU | |
| | UGCUGGGGUUGUUUUUUUUCUUGUAAAUUUGUUUAAGUUCCUUGUAAAUU | |
| | CUGGAUAUUAGACUUUUGUGAGAUGGGUAGAUUGCAAAAAUUUCUCCCAU | |
| | UCUGUAGGUUGCCUGUUUGUUCUGAUGAUAGUUUCUUUUGCUGUGCAGAA | |
| | GCUCUUUAGUUUAAUUAGAUUCCAUUUGUCAAUUUUGGCUUUUGUUGCAA | |
| | UUGCUUUUGGUGUUUUUGUCAUGAAGUCUUUGCCCAUGCCUAUGUCCUGA | |
| | AUGGUAUGGCCUAGGUUUUCUUCUAGAGUUUUUAUGGUUUGGGGUUUGAC | |
| | AUUUAAGCCUUUAAUCCAUCUUGAGUUGAUUUUUGUGUAAGGUGUAAGGA | |
| | AGGGGUCCAGUUUCAGUUUUCUGCAUAUGGCUAGCCAGUUUUCUCAGCAC | |
| | CAUUUACUAAACAGGAGAUCCUUUCCCCUGUUUAAUAAAUUUUAUAUAAG | |
| | UUUAUUAAAAUUAUAGAAUUGUAGAGCUAGAAGAUUCUUAGAAGGUCUAU | |
| | AGUCACUAUGUUAGCAGAUUCUUAGAUUAGUCAUAUUUGACUCAGCAAGU | |
| | ACAGUGUUGUAUUUGUAUUAGGUUCUUUUUGUGUUAGUUUCUUCUUUGUA | |
| | UUUGUAUUCUUGAAUUUGUAUUAGUUUUCUUUUCUUUCUUUUUUUUGGAG | |
| | ACAGGGUCUUGCUCAGUUGCUCAGGCUGCAGUGCAGUGGCAUGAUCACAG | |
| | CUCUCUGUAGCUUUGACCUCCUGGGCUCAAGCAAUCCUCCCAGCUCAGUC | |
| | UCCUAAUUAGCUGGUACUAUAGGUGCACACCAUCAUGCUUGGGUGAUUUU | |
| | UUUUUAAUAUUUUUUGUAGAGACAGCGUUUCACAUGUUGCCCAGGCUGGU | |
| | CUCAAAACUUGGGCUCAAGUGGUCCGCCUUUCUGGGUCUCCUAGAGUGCU | |
| | GGGAUUACAGGUAUGAGCCACCACGCCCAGCUUGUAUUAGUUUUCUCUUA | |
| | CUGUGCCACAAAUUACCACAGACUGUACAGCUUAAAACAACAUGUAUUUA | |
| | UUAUCUUACAGUUGUGUAGGCCAGAAGUCUAGGUACAAUGUCACUGUAUU | |
| | CUCUUCUCAGGGUUUCUUUAGACUGAAAUCAAAGUGUUGUCCAGGGCUGG | |
| | GCUUCUUAUUUGGGAUUUGGGAUUCUCUUCCAAGUUCAUUGUUUGUAGGC | |
| | AGAAUUCAUUUCCUUGAAAGCUUAUUGACUGAGCUCCCCAUUGUCUGCUA | |
| | GCUGUCAAAUCUCUGACUUCCUCUCCUGAAACCAGCCAGAGAAAACUCUU | |
| | GGUUUUUAAAGGGAUCAUGUGAUCAGGUUAGGCCCACCUCGAUAAUACAG | |
| | UUUUUGCCCUGUAAUAUAGUUUUGGAGUGAUAUCUCAUCAUAUUUACAAG | |
| | UUCUGCUCACAUUCAAGGAGAGGAGAUUUUACAAGGGCGUGGGUCAUGGG | |
| | GAACGAGUUACCUUUUGCCUGACACACACACAUACACACACACACACACA | |
| | CAUAUAUAUGUAUGUGUGUAUAUAUAUAUAUAUAUAUAUAUAUAUAUAUA | |
| | UAUAUAUAUAUAGCAAUGACUGUAACUUUAUGGUCUGCGGGAUUAUUUGU | |
| | AUCUAGGAAAUCUGCCUUCUGAACAGUGGUCAGAAGGUCUGGCUUGUCUG | |
| | GUUAUUGCCAUCUAUUCCUACUUCAUUUUACUCACAUACCCCUGGCCCUA | |
| | AUGUGCUUUUUGGGAAGUAGGCAAUACUCUCUCGUGGGUAUCUUUGGCUU | |
| | AGUGGUGCCAAUAUUCCAGGCUUAAACUUCUCCUCUCUCCUUUGUUCUCA | |
| | CACUGGAGACUACUUCAAUGUUUAUGGCAAAUGUACACACUCUGGUUUCA | |
| | UAGUAUUUAAAAUAAAGUGACCAUAUUUCCUACUUAUAAGACAAUUUUUG | |
| | GCUCAGAAAUGUAUACAGAAAUACACUUUUUAAAUAAUUUUCAGGCACAG | |
| | UUUCAAAUACUCACUAAAUUGCUCCUUUCCCAUUUUUCCUAUAAUGCACA | |
| | AUAAUGUAUGUCCCUUGAUCUAGUCCCAGAAAAGGUUUCCAGGAAGAUUU | |
| | CUGAGAAAAGCGCAUAUGUGACAUUUUCUGAAAUGAACUUGCUCAGCAAC | |
| | AUGUACUUUUUUCCUUUUUGUUAAUGUCCCCAUAUUUGAGCAGAAGGUAA | |
| | AAUUUUGUUUACAUGUAUAACUUGCUUCAAUUUUUCACACACGUUUUCUA | |
| | AGAAUGUGCAUACUGAAGUUGGUGGGUUAUAAAAGGGAUUAAUACCCCUU | |
| | UUGGCCUAUAUUUAUUGGAAAGACCAAGUUGCCAGGGUUCUUUGAAGAAU | |
| | UCAGACAAAUACAUCUGAAUAUUUUCCAUCAAACGGGAGGUAGAGGAUCA | |
| | AGCAUGGAUUUGCUCUUUAUAGCACUUCUGGCAAGAGGCUUUUGGAAUAA | |
| | AAUUUAUGUAUUCCUUCUCAAUUUGGUUAACCGCAACAUCUGUUUGUCUC | |
| | CAUUGGCCUUUGGCCAUUGACCUACUGUCUCCUGUAGAAGACACCCACCA | |
| | UCACUCUUACGACCAAAUGUUGAUGGGAAACAAGCAGUUCUCAAGUGAUU | |
| | UUAGUCAUGGAAAUAGUGAUAAGCCAAAAGCAUGGCCUAAUUAUAUCAUC | |
| | UAAAUUCAUGGAAAAGGGAAUUAAUUUUAUAUUUUAUCUGAUUUUGGGGA | |
| | CUGAAUUAUUAAUAGUACCAACUUAUUUGGACAGGAAAAGGCCAAGAGAU | |
| | UUAGACAAGAACACAGUAAACAGACCCUUCUCAUUCAAUAUAGCAUGGGA | |
| | CAUGUAGAUUUACUUUUUGACUGCAGGAACAAUUAGAGGAAUCUAGGUGA | |
| | UUUUUCCAAACUUAGGAAAUGAAAGUUUAACUAAAAUUAAAUAUGUCUGU | |
| | AUGUUUAUACAUUUUUGAGAUAAAACACUAUUUUCUCUAGUUUUUUAAAA | |
| | AUGAUUUUUUCUAAUUUCUAACAAUAGCUUAUAAGUUUACUACACAAUUA | |
| | UUGCUACUUCGAAAACGGAUUUACCACUGUUAGGCAGAACAAACAAAGGU | |
| | UCAGGAGAGGCCAAUGCCUGUGAGACCGUGGUACCAGGAUCUUCCAGUAA | |
| | CAACUUGGAGCCUGCCAGGCUAUCCUUUGAUCAAGGGCUCUCUCAGUGUU | |
| | GGUACCUCUUGCUGCCUGGUCCUGCUUUGUCCUGGCCAGCCAUACCCUGC | |
| | CCAGCUGUGAAAGACCAUUCAGUUUCUGCUUUUUCUUUAAUUUUUAGAUU | |
| | UUUUUUGUUUACCUCAAAUUAUUCCAGUUGCAUGAUAGCAAAAGUAAGCC | |
| | AGGUCCCUUUAAGAAGCACUGGACUGAAAAUCCAGCUUCUGCUAUAAAAA | |
| | CUCAUUUCCCCACUCAAGGCAUUUUCCUUCUGAUUUCAGAGGUGAGGUAC | |
| | UCAGAUGUGCUUUUGCCUCCAAUCUCAGCAUCUUCUCCUAUUCAUUUGUU | |
| | GCCCAUUCUAUGCUUUCAAUUUCUGCUAUAGCCACUCAGUCUUCCUCUGU | |
| | UCUGGUCUCAAGGUGAGCAUUUUCUGCUACCCCUGUGUCUAGUGACACCU | |
| | CCCAGUUUCUGGCACAUAACUCUUUUCUCUGGUUCUCUCUUAAGACCUUG | |
| | GUUUGUCUCUGGCCCAAUUCAGGCCACGAUUUCUACCCACCUUGACCUUU | |
| | GCCAUGGUUGGAGCUGUAUCUUAUGACACUGUGUUAGCUGUAUCUUAUCA | |
| | CACAAACCUGUGGGAACAAGAGAUGUAGUAUCUACCCACAAGGAAUCUAC | |
| | AGACUACUGGGAAUAGCAGACCCUCAUUAAUUAAUUAUUAGCAUUAAUUC | |
| | UUCAUGCUUGUAAUCCUAAAUUUUUUAAAAAUUUGAGAACAAUUUUUUUU | |
| | UCUGUCUAGUUUGGGUGUUGGCUAUUCCUAAAUAUUAUGGUACUUACUUG | |
| | UUUACCUGAAGGCUGGUUUCUCACCUGGCUGCACCUCUGCUGGGGGGUGC | |
| | UCACUUUGUCCCUAACUUUUGGGUCAAUAGGAAGAAGUAAGACAUUGAGU | |
| | GAAUAAAUUUGACCUUAAGCUGCUCUUUGCCAUGGAGGAGUCCUGGCCCC | |
| | UAGUGUUUGACUGUCAGUGUUUCUUUACCCCAUAAAAAUUUUCAUCCCUA | |
| | AUAAAAUGCUGCCAUGUAACUGACUCUACAUGCUGAACCAAGAGAAAUUA | |
| | AGAAGAAUAAACCUAAUUUGCUUCAGAAAAGAAUGUUUCAAUAUAGAGGA | |
| | AUUAUUUCUUAUUUUAACCUUGAUAAUUUUGCCUAUAACAUUUUCUGGAA | |
| | AAUAGAUAAGUAUGCAGAGUCUUAGUUAUAUUUAUAGUAAAAUAAAAUAU | |
| | AGCAAGGUUAAUGGAAUUGUCCAGAGACCCACAACGAACAGAGGGCAGAU | |
| | CACAGAACUCCACACUCAUACUCAUGUUCUAGCCAUUAGGCCUCUUGGCC | |
| | UCUCUUUGUUCUAUUUGCCAAGGUAUGACCAGAGCAGAAAACAUCCUCAA | |
| | CCAAUUAGGCAAGCUCCCCAUCUGGUGAUUAGUCUUGCUAUGAAGACAUC | |
| | UUGUGUAUUACCACAUUUACGACUGCAAUUGGAGCUUUAUUUACCAUUGG | |
| | GGGUAUAGCUCUUUCCGAGGAAAUGACCUUCUAACUGAGCCAGGAGGGGC | |
| | UGGGCUAAGUUUGUUUCAGCUGGAAAUUACACAUUACAUAUUUAGUAUGU | |
| | UUGGUCACUUUAGAUCUCUGUGAGGCAGGGAAGGAGAAUUUUAUGCAUUA | |
| | CAAAGUUCCUAAAAAUAUUUACAAUCUUGUAAAUCAAAGUGGGUUUCUAC | |
| | UGGAUUUAGCUUUAUGCAAAUCUUUAUAUUAUGUCUGGGCUUUCAGUCUG | |
| | AUUUUAGAAGAGUACUAUUACAGUAUUUUAACUUUUAUUGAAAAUCCAGG | |
| | CUUUUUAAUUUUUUUAAUUUUUAAUUUUUGUGGGUACGUAAUAGGUGUAU | |
| | ACAUUUAUGGGGUACAUGAAAUAUUCUGGUAUAGGCAUGCAAAGCAUAAU | |
| | AGUCAUAACAUGUAGAAUUGGGUAUCCAUCCCCUGAAGCACUUGUCCUUU | |
| | CUGUUACAAACAAUUAAAUUGUAUCUUGAGUUAUUUUAAAAUGUACAAUU | |
| | AAAUUAUUUUGACGACAAUCACCCUGUUGUACUAUGAAAUACUAGGUCAU | |
| | AUUUAUUAUUUCUAUCUUUUUUGUACCUAUUAACGUCUCAAUCUCCUUCU | |
| | CACUACCCUUCCCAGUCUCUGGUAACCAUUCUUUCAUUCUUUCUCUCUAU | |
| | GAGUUUAACUGAUUUGAUUUUUAGAUGCUACCAGUAAGUGAGAACGUGAG | |
| | AUGUUUGCUUUUCUCUGCCUGACUUAUUUGACUUAAUGUAAUGAAUUCCA | |
| | GUUCCAUCCAUGUUAUUGCGAAUGACAGGAUUGGAUUUAAUUUUCUUUUA | |
| | UGGCUGAAUAGUACUCCAUUGUAUAUAAGUGUCACAUUUUCUUUAUUCAU | |
| | UCAUCUGUUGAUGGACACUUAGGUUGCUUCCAAAUCUUGACUAUUGUGAA | |
| | CAGCGCUGGGACAAACAUGGGAGUACAGAUAUAUCUCUUCAAUAUGCUAG | |
| | UUUCCUUUUUUUGGGUAAAAACUCAGCAGAAGGAUUCCUGGAUCGUAAGG | |
| | UACCUCUGUUUUUAAUUGUUUUGAGAAAACUCCAAACUGUUUUUCAUAAU | |
| | GGCUGUACUAAUUUACCUUCCCACCAACAGUGUAUAAGGGUUCCCUUUUC | |
| | UCCAUAUCCUCGCCAGCAUUUGAUAUAGCCUGACUUUUCUUUUUUUGAGA | |
| | UAGGGUAUCACUCUGUCACCCAGGCUGGAGUGCAGUGGUGUGAUCUCAGC | |
| | UCACUUCAGCCUUGACCCUGUGGGCUGAAGUGACCUCCCACCUCAGCCAC | |
| | CCGAGUAGGUGGGACUACAGGCAUGUGCCACCAUGCCUGGCUUGCCUGAC | |
| | UUUUAGAUAAAAGUCAUUUUAACUGGAGUGAGAUGAUAUCUCAUUGUAGU | |
| | UUUGAUUUGCAUAUCUCUGAUGAUCAGUAAUGUUGAGCACUUUUUCUUAU | |
| | GCCUGUUUGCCAUUCAUAUGUCUAUUUUUGAGAAAUGUCUAUUUAAAUCU | |
| | UUUGCCAAUUUUUAAAUCAGAUUAUUAGAUUUUUAAGUUUUAUGAAGUCU | |
| | AGAAAUUUUAGAGUUGUUUGAGCUUCUUAUGUAUUCUAAUUAUUAAUCCC | |
| | UUGUCAGAUGAGUAGUUAGCAAAUAUUUUCUCACAGCCUCUGUGUUAUCU | |
| | GUUUACUUUGUUGAUUGUUUGCCGUGCAGAAGCUUUUUAAUUUGAUGUGA | |
| | UCCCAUUUGUCUGUUUUCGCUUUGUUUGCCUAUGCUUGUGGGGUAUUACU | |
| | CAAGGAUUUUUUUUUGCCCAGACCAAUAUCUUGGAGAGUUUCCCCAAUGU | |
| | UUUCUUGUAGUAGUUUCAUAGUAGUUUGAGGUGUUAGACUUCAGUGUUUA | |
| | AUCCAUUUUGCUUUGAUUUUUGUAUAUGGUGAGAGAAAGGGAUCCAGUUU | |
| | CAUUCUUCUGCAAGUAGAUAUCCAUGUGGAUAUUCAGUUUCCCCCAUACC | |
| | GUUUAUUGAAGAGACUGUCUUUUCUCCAGUGUAUAUUCUUGGCACCUGUG | |
| | UCAAAAACGAGUUCACAGUAGGUGUGUGGACUUGUUUCUGGGUUCUUUAU | |
| | UCUGUUCCAUUGGUCUAUGUGUCUGUUUUUAUGUGAGUACCAUGCUGUUU | |
| | UGGUUACUGUAGUCCUUUAGUAUAAUUUGAAGUCAGGUAAUGUCAUUCCU | |
| | CCAGUUUUGUUCUUUUUGCUCAGGGUAGCUUUGGCUACUCAGGGUCUUUU | |
| | GUGGUUUCAUAUAAAUUUUAGAAUUGCUUUUUCCAUUUCUGUGAAGAAUG | |
| | UCAUUUGUAUUUUUAUAAAAAUUGCAUCAAAUCUGUGGAUUGCUUUGGGU | |
| | AGUAUGGACAUUUUAACAAUAUUGAUUCUUCCAGUCCAUGAACAUAGAAU | |
| | AUCUUUCCAAUUUUUUGUGUCUUGUUCAAUUUCUCUCAUUAUCAUUUUAU | |
| | AGUUGUCUUUAUGGAGAUCUUUCACUUUAAUGGUUAAUUCUUAGUUAUUU | |
| | CAUUUUAUUUGUGGCUAUUGUAAAGGGAGUACUUUCAUUAUUUCUUUUUC | |
| | AGAUUGUUCACAGUUUUUAUAUAGAAAUGCUACUGAUUUUCAUAUGUUGA | |
| | UUUUGUAUCUUGCAACUUGACUGAAUUUAUCAGUUUGAAUAGUUUUUUUG | |
| | GUGUUGUCUUUAGUUUUCUCCAAAUGUAAGAUCAUAUUAUCUGCAAAGAA | |
| | ACAUAAUUUGCAUUCUUCAUUUCCAAUGUGGAUGCCCCUUAUUUUUUUUU | |
| | CUUGUCUGAUUGCUCUAGCUAAGACUUUCCUUACUAUGCUGAACAACAGU | |
| | AGUGAAAAUGGGCAUUCUUGUAAUGUUCCAGAUCUAAAAGGAAAGGCUUU | |
| | GAUUUUGUCCCUGUUCAAUGUAAUACUAGCUGUGGGCCUGUCAUAUACGG | |
| | CUUUUUUAAUGUUGAGUUAUGUUUCUUCUAAACCAAGUUUUUUGAGGUUU | |
| | UCUAUUAUGAAGAGAUGUUAAAGUUUAUCAAAUGCUUUUUCGACAUCAAU | |
| | CGAAAUGAUCAUAUGUUUUUUGUCCUUUAUUCUAUUAAUAUGUAGUAUCA | |
| | CCUUGAUUAAUUUGCAUAUGUUGAACCACUCUUGCAGCCCUGGGAUAAAU | |
| | CCCACCUGGUCAUGAUGAAUGAUCUUUUUAAUGUAUUGUUGAAUGUGGUU | |
| | UGCUAAUAUUUUGUUGAGGAGAAAACCUAGACUAUUUCAAUGUGUUUAUG | |
| | CUUAGCUAUCAUGCCCAAAUCAAUUUAGUACAUCGUUUAAAGAUUCCAGA | |
| | UACUCUAAAUCUGGCAACCAGGAAAGAAAACAGCCAUAAAGCAAUGUAUA | |
| | UUUAGAUACCAAUAUUUCCCUCACACUUUCUUUUCGCUUCCUUGUUUCAU | |
| | UUCUUUACUAAUUUGUUGAUUAUUGGCUUAUGACAUAUUGAGGCCUCAGU | |
| | CUAUAAUAACCAUUUUUAUCUGAUGUACAGCUCUACACAUUUUAUUUAAC | |
| | UCUGUGAUGGCAAACUCCUGGUACUUUUGUCAUUCUCUUGCCUCUUAGGC | |
| | UUAUGGCAGAUAUCACUAAACAGUGACAAUAUUCUUUGCUACUAACCUGU | |
| | GGGUUUGGCAUACACAGUAGUGUAUGCAUUAUCAACCUAUAGAAGUGGCU | |
| | UAUAAGUUUAAGUCUGCUAGCUUUUUCUACUCUUUUAGCAUUCUUAAACG | |
| | CUGUUUAAUUAGAUGUAAAAGAAGGAAAUGAGAAGUUAAAUUUGGACUAA | |
| | AUGUGAUAAAAGAAAAUCUUUAUUAACAUAGGAUAUCAGUGAGUCUGAUG | |
| | AAAAGGCUUUAAAAUGCUCUAGGAAGUAUUUCUGCCUGGGAUGUUUGAAU | |
| | UAAACAGUCUCCAAAAGUAGAUCAUUCUCCUUUUGUUUGAAUAUUUUCAG | |
| | AAAUGAUAAAUACACUUUUUGCUGUUGUUGUUGUUUUGAGACACCCAGGG | |
| | UGGAGUGCAAUGGCAUGAUCUUGACUCACUGCAACCUCCACCUCCCAGGU | |
| | UCAAGCGAUUCUCCUGCCUCAGCCUCCUGAUUAGCUGGGAUUACAGGCAC | |
| | CCACCACCACACCCGGGUAAUUUUUGUAUUUUUAGUACAGAUGGGAUUUC | |
| | ACCAUGUUGGUCUCGAACUCCUGACCUCAGGUGAUCCACCUGCCUCUAUC | |
| | UCUGAAAGUGCUGGGUUUACAGGCAUGAGCCACUGUGUCUGGCCUAGAAA | |
| | UAAUAAAUAUACUGUUUAAUGAAAUAGCUUAUUCUAUGUUUGAAGUUUCU | |
| | UAAGUUUAGAAAAUUUUAUGUCGAACUGAAAUUUCUUUUUCUAUAACUUA | |
| | UACCAAUUUUUCUUGUAUUCUUUCAAUGGAAAACAAUGUUUUUUAUGUUU | |
| | UAUGUUUUUAAAAUUAAGAUGUCAUUUAUUUAAAAUAGAAUAAAAUAUAG | |
| | AGGUCCUAAGAUUUCAGUUUGAUGACUGUUGAAAAUUGUGUACACCUAUG | |
| | UGACUACUACCCAACAUAAGAUAUAGGACAUUAGUUUCAUUCCAGAAAGA | |
| | UCGCUAUUCCUGUUUCAAGUUAAUUUCCUGCUCUUCGUCCCAUAAAGGCA | |
| | AUCAGUUUCUUACUUCUGUCACCAUUGAUUAGUUUUAGUGAUAAAAAUGG | |
| | ACUUAUACAGUACGUAUUAUGUCAUAUGUAUAAAUAGAUGUAUUAUGACA | |
| | GUAAGGUUGUUAUGAACAUUUCUGUAAAAACUUUAAUGAACAUAUGUUUU | |
| | CAUUGCUUUUGGGUAAGUAUAUAGGAAUAAAAUUGCUAGGGCAGAAGUUA | |
| | UGUUUAACUUCUUUAGAAACAGCCAAACAGUUUUCCAGAUUGAUAGUACC | |
| | CUUUUGCAUUCUCACUAGCAAUGAAUGAGUUCCAGUUGCAACAUGUCUUG | |
| | CUAGUCAUUUAAGUAUAGCCAUUCUAGUAGUUUUGAAUCUGUAUUUCAUU | |
| | CUGGUUUCAAUUUGUGUUUUCCUGAUGACUAUACAUUUUAGCAGAUUGAU | |
| | GGAGUUAUUAACCCUUUAAAAUAAAUGUAAACUUCCCAACCCAUUUUUAU | |
| | CUAAGCUAGUACUAAUUUAAAUCUCCCCUUACGUGUGCUAUUGUUUGAAA | |
| | UAAAAUGUAUGACAUUAAAUUUACUUUAAUAACAUUAGAUAUUAUGUAUG | |
| | AUUUUCACCUAUUAAGAUAAUUUUAAUUUUGUCAUUGUAUUAGUUACAAA | |
| | UAUGUAUUAUAGAUCUGUGGCUAAUUUAACCAAAAAUACCUGAAAUACCU | |
| | GGCUUUAUGUCUGUACCACUACUUCAUAUUGAGGGACAAAGCUAUGAGUA | |
| | GAAUCCUGCACUUCCUCAUUAGAAGAAGCAUUUUUAAUUAAUAUUGACUC | |
| | UUGAGAUGAUUGUUCAACCUGCUUUUAAAACUUCUGAAUUUUUUCAUCAA | |
| | CCCAUAUUACUAUAUCUCAUUGAUUAAAUGCUCAUGAGGGAUUUGACCAA | |
| | UGACUUAGCAGUGUCAAAAUCUGCUAAACUAUGAGAAUAUGCUGUUCUAA | |
| | UAUCCUAAAAAUGCUGUAAAGGUGGAGAUUAUUUCAGAUAAUAGCUCCUA | |
| | AUUAUUGCAAAACCAUGAUAUAACAAAGAGAUCACUAGACUUGUAAUCGU | |
| | AAAUAUUUCAUUUUCUAGCUGGAUUACCAGGAAAAGUCACUAUAUUUAUC | |
| | UGAAUUCUAUAUUUCACAUCUGUUAAAUGGAGAUAGUAGUAUCUAUUUUG | |
| | UCUACCUCAUAGGGUUGUUGUGAUUAUCACACUAGAUAUUGUGAUUAUCA | |
| | CACUAGAUAUUGUGUGUAAAGUGUUUUGUAACUGUAAAAAAAUACAUAUG | |
| | UAAGAUAUUAAAAGCUUGUAUGUUGAUGUCGCCAGUUUAUAGCAUAGUGU | |
| | UUGCACAUAGUAGGUGCUCUAACAAAAGUAGCUUUUGUUAAAUGAUGGCU | |
| | GGAUGAACAAUAUCUCAAAGCAAUUUUGUUAAUAAACAAUUAUAGAAAUU | |
| | GUUAAAUAUUAUAUCAAUAUUAAUACAAAAAUUCCUGCUCCACUUUAGUA | |
| | AAAGUCACAUUUGUUCAUUUAUAGUCUUUUGGAAUCCCUCAUAUUCUUUG | |
| | UGACUACUUGUGAUAAAUGUCAACAAGUUUGACAUCACUCAAGCAGGUAC | |
| | UUGAAGGGGCCCUAGCAGCAAGUCAUUUAUGGCAGAAUUCCAUUUUUAUA | |
| | AAUAUCAUGGGCUUGCCUUCCUACUCCUUAUUAUUGAACUCACCUUUAAU | |
| | UUGAAGACUAUUUUUAAAAUAAGAAAUAUUUAAGCAAAAAUUUCUAUUUU | |
| | UCUUGAUCUUGAGUACCUGCUCAUUGCUAUUUGUUACCUUUCCCAAUAUC | |
| | AUUAGGUGGUAGUUUAAUUUCUUUGUUUGUUACUGUUCUGAGCAUUUUUA | |
| | AAGUGCUUGACUGAUUUAUUUUAAUCCUGCUAUUAUAUGUUUUCCCCAAG | |
| | UCUCAGGCCUUAUCUUAUUUCCUCUCGCAGUAGCAUUUGACACAGUGGAC | |
| | CAUGCCCUUUUCCUUGAAACUCUUCAUCAUCACUGUGUGGGCUCCCCAUU | |
| | GCCUGAUUCUUCUCCCACUUCACUGUCUGUUCCCUCUAAGUGUCCUUAAC | |
| | UGCUUCUUUUUCAUCUCCCUCCAUGAGACUAUCAGAAAAUUUAUUACCAG | |
| | AAAUCUUGCAGAACAGGAGUGAGUGGGAUGAUAUAUUAAAAGCAGUAAAA | |
| | GAAAAAAAAUCUAUCACAUGAUGAUAAAAUGGUCAGUUCAACAGCAAGUU | |
| | AUAACAAUUACAAAUAUACACAUACCCAACAUCAGAGCACCUAAAUAUAU | |
| | AAAGCAAAUACUAAAAGUUACAAAGGGAGACUGACAAAAAUACAAUAAUA | |
| | GUAGGAUACUUCAGUGCUGUACUUUUAAUAAUAGAUAGAACAUCCAGAUA | |
| | CAAAAUCAAUAUAGAAACAGCUAACUUGAACAAUACUAUGUACCAAGUGG | |
| | ACCUAACAGACAUAUACAGAUCUUUCCAUCCACCAGUAGAAGAAUAUAUA | |
| | UGUUUUUCAAGUGCACGUGGAAUGUUCUCUAGGAUAGAUCACAUUACAUC | |
| | ACAAAACAGGUCUGAUCAAUUUAAAAAGAUUAAAAUCACACCAGUUAUAC | |
| | UUUUCAGCCACAAUAGAAUAAAACUAAAAACAAUAACAGUAAAAAAAAUG | |
| | AGAAAAUUCACAAAUACAUGGAAACUAAACAACACACUCUUGAACAAACA | |
| | UUGGGCAAAAGAGAAAAUAUAGUGGGAAUGUAAAAAGUAUCUCAAGAUAA | |
| | AUGAGAAUACAACCUACGAAAACUUAUGGAUGCACAAAGGCAGUACUAAG | |
| | AAAAAAGUUUAUAAUGGCAAACACCUAAUUUUAAAAAGUAGAAAAUUUAA | |
| | AAUUUAAAUUUAAAAAUAUUUUAAAUUAAAAAAUUUAUCAGAAAAAAUAA | |
| | UAAGAUGACAGUAGAAAUAUGUAAAAUUCAGAAUAGAAAAAAUUUGAAAA | |
| | ACUAAGAGUUUUUUUUGAAAAGAUAAACAUUGAUAAACCCCUAGCUAUGC | |
| | UAAUAUAAAAGAAGAUUCAAAUAGAAUUAAAAAAGAAGAAAUUAUGAGAU | |
| | GACUUAUAAAUAAAAGAAUUAUAAGAUGCUGUUAUGAAAAAUUAUACUCA | |
| | AAUAAAUUAAAUAACCUUGAAGAAAUGGAUAAAUCUUUAAAAACAUACAA | |
| | CCUACCAAAACUGAAUCGAGAAUAAAUGGGAAACCUAAACAGAUCAAUAA | |
| | UAAAUAAGGCGAUUGAAUCAGUAGUCAGAAACCUUCCAAGAAAUAAAAGC | |
| | CCAGGAUCAGAUAGCUUCACUGGUGAAUUCCACCAAAUAUUCAAAGAAUA | |
| | AUUAAUGCUCAUUCAUUUCAAACUCUUCCAAAAAAGUGGAAGGGGGGAAU | |
| | ACUUCCAAACAUAUUUUUAUGAGGCUGGCGUUAUUCUGAUACAAAAGCCA | |
| | GAAAAAGAGAACACAAGCAAAGAAAACAUAGGCCAGUAUUCCUGGACAUA | |
| | AAAGCAAAAAUUCUCCACAAAAUACUAGCAAACUGAAUCCAAUAACACAU | |
| | UAGAAAGAUAAUGCACUUCACAUAUGUUGAAUGAUUCUUGUAUCCAGGGA | |
| | UAAAUUUCACAUGAAUCAAGUGAGAUUUAGCCCUGGGAUUCAAGAAUGGU | |
| | UCAACAUAUGCAAAUUAAUUGAUGUAAUACAUCAUGUUAAUAUAGCAAAA | |
| | AAAGCACAUAAUUUCAAUUAAUGCAGAGAAAGCAUUUGACAAAAUUCAUC | |
| | AUUUGUUAAUGACACAGACUCUUAACAAAAUAUGUAUAAAAGAAACCUAC | |
| | AUGAAACUAAUAAAGGCCAUAUAAGAAAAGCAGAGAGCUAUAUAGCAUCA | |
| | UAAUCAAUGGAGUGAAACUGAAAGCUUUUUUUUUAAGAUUAGAAACAAAG | |
| | CAAAGAUGUCCACUCUUACCACUUCAUUCAACAUAGUACUGGAAGUUAUA | |
| | GCCAGAAUAAUUGGACAAGAGAAAGAAAUAAAAGUCACUGAAUAAAAAAG | |
| | AAAGUAAAACAUUAUAUGCUUGCGGAUGACGUGAGUGUAUAUGUAGAAAA | |
| | CCAUAAAGACUCAAGAAGAAACUAUGAGAACUAAAUAAAUGAAGUCACUA | |
| | AAGUUGUGGGAUACAAAACCAACAUAGAAAAAUCAGUAGUGAUUUUAUAC | |
| | AUAAACCAUGAGCUACCCAAAAAGGAAAUAAAUAAAAUAAUUCCAUUUAU | |
| | AAUAGUAACAAAAAGAAUAAAAUAAGAUACAAAUUAAACUAAAGAAGUUA | |
| | GAAAAGUGUACAAUGAUAAUUGUAAAACACUGAUGAGGGAAAUUAAUGAA | |
| | UGCACAGAUAAAUGAAAAGACAUCCAGUGUUCAUGGAUUGGCAAAACUAA | |
| | UACUGUCAAAAUGUCCAUCCUAUACAAAGUGAUCUUCAGAUUUAAUGCAA | |
| | UCCCUUAUCAAAAUCCCAGUGGCAUUCUUUACAGAAACAGGAAAACAAAU | |
| | UCUAAAUUUUUAUAGAACCAUGAUAGACCUCUAAUAGCCAACUCAGUCCU | |
| | GAGAAAGAAAAAGCUGAAGGCAUCAUACUUCCUGAUUUCAAAAUGUGUAA | |
| | CCAAAACUACACUAAUAGUGUAUAUGUGCCACAUUUUCUUAAUCCAGUCU | |
| | AUCGUUGUUGGACAUUUAGGUUGGUUCCAAGUCUUUGCUAUUGUGAAUAG | |
| | UGCUCCUAUAAACAUAUGUGUGCAUGUGUCCUUAUAGCAGCAUGAUUUAU | |
| | AAUCCUUUGGGUAUAUACCCAGUAAUGGGAUGGCUGGGUCAAAUGGUAUU | |
| | UCUAGUUCUAGAUCCCUGAAGGAAUCGCCACACUGACUUCCACAAUGGUU | |
| | GAACUAGUUUACGGUCCCACCAACAGUGUAAAAGUGUUCCUAUUUCUCCA | |
| | CAUCCUCUCCAGCACCUGUUGUUUCCUGACUUUUUAAAUGUGACACAUAU | |
| | ACACCAUGGAAUACUAUGCAGCCAUAAAAAAUGGUGAGUUCAUGUCCUUU | |
| | GUAGGGACAUGGAUGAAACUGGAAACCAUCAUUCUCAGCAAACUAUCGCA | |
| | AGGACAAAAAACCAAACACCACAUGUUCUUGCUCAUAGGUGGGAAUUGAA | |
| | CAAUGAGAACACAUGGACACAGGAAGGGGAACAUCACACACCAGGGACUG | |
| | UUGUGGGGUGGGGGGAGUGGGGAGGGAUAGCAUUAGGAGAUAUACCUAAU | |
| | GCUAAAUGAUGAGUUAAUGGGUGCAGCACACCAACAUGGCACAUAUAUAC | |
| | AUAUGUAACAAACCUGUACGUUGUGCACAUGUACCCUAAAAUUUAAAGUA | |
| | UAAUAAUAAUAAAAUAAAAAAACUACACUAAUAGAAAUAGGAUGGUACUG | |
| | GCAUAAAAACAGACAUAUAGAUGAAUGAAAUAGAAAUAGAAGUAAAUGCA | |
| | CACAUCUGUAGCCACCUGAUCUUUGAUAAUGCUGCUGAGAACACACAAUG | |
| | AAGGGAAAGGAUAGUCUUCAAUAAAUGGUAUUAGGAAAACUAGAUAUCCA | |
| | CAUGCAGGGAAAUAAAAUUGUACUACUAUCUCAUAGUAUCUACAAAAACC | |
| | AACUCAAAAUGAAUAAAAGACUUAAACAUACGACAAAAAACUUAAAAACU | |
| | GCUAGAAAAAUACACAGGGAAAAAGGUUCUUGACAUUGAUGUUGGACAGU | |
| | UAUAUUUUGGAUGACACCAGAAUCACAGACAGAAGGAAUGAAAUAGACAA | |
| | AUUGGAUUGUGUCAAACUGAACUUCUGCACAAAGCAAAUAAUCUACAGAG | |
| | UAAAAGACAACCUAUGGAAUGAAGAAAGCAUUUGCAAACCAUAUACUUUA | |
| | UAAGGGGUUAAUAUUCAAAAUACAUAAGAAACUCAGUGACAAAAAAGCAA | |
| | CACUUUUUAAAAAUGAGCAGAGGGUGUGAACAUUUCUUAAAAGAAGACAU | |
| | ACAAAUGUUCAACAAGUGUUGGAAAAGGUGCCCAACAUCACCAAUCAUCA | |
| | GGAAAAUGCAAGUCAAAGCCACACUGAAAUAUCACUUCAAACUUGUUAGA | |
| | AUGAUUAUUAUCAAAAUGAUGAAAAAUAGCAAGUGUUGGCAAGGAUGUGA | |
| | AGAGGGGACCCUUGUGCACUGUUGGUAUGAAUGUAAAUUAGUUCAACUAU | |
| | UAUGAAAAACACUAUGGAAGUUGCUCAAAAAUUUAAAAAUAGAACUACCU | |
| | UAUGAUCCAGCUACCUUAGCUCUAAGUAUAGUUUCAAAAAAUAUAAAAUU | |
| | AUUAUCUGGAAUAGCUUGUUCCAUCCUCAUGUUCAUUAAAGCAUUAUUCA | |
| | CAUUGGCCAAGAUAUGGAAAGAACCUAAAUGUCCUUCAAUCAAUGAAUGG | |
| | ACUACAUAUAAUAUGUACUACUAUAUAUACACACAUAUGUAUGUGUAUAU | |
| | AUGUUUAUGUACUAUAUAUACACAUACAUAUGUGUGUAUAUAUACACACU | |
| | AUAUAUGUAGUUAGAAUAUAUAUACAUGCUAUAUGUAUGUAACUAUAUAU | |
| | AUACACACUUCAUAUACAUGUAGUUAGAAUAUAUAUGCACACACAUUUAA | |
| | ACUACAUAUAUAAAUGUAGUAUAUAGGUAUAUAUGUGUAUUACACAUAUA | |
| | UGUACGUAUAUAUAUAUAAAUGCAGUGUAUAUGUAUAUAUGUAGUGUAUA | |
| | UGUGUAUAUAUAGUAGUAUCUAUAAAAUGUUGUCCAUUCAUCUAUUGAUG | |
| | GACAUUUAGGUUGUUUCUAUAUCUUGCCUACUGUGACUAAUGCUUUAAUG | |
| | AACAUGAGAGUGGAACUAGCUAUUCCAGAUAAUAAUUUUGUAUGUUUUGG | |
| | AUCUAUACCUAGAGCUAAGAUUGCUCUAACAAUGUGUGUGUGUGUGUGUG | |
| | UGUGUGUGUGUGUGUGUAUUCUAACUGCAUACGCACACAAUCCAUGCAAU | |
| | AGGUUAAGAUUCCACCGUAAAAAAGGAAACUUCGUCAUUUGUGACAAGGU | |
| | GGAUGAAUCUGAAGGACUUUAUGUUAAGUGAAAUAAGCCAGACAUAGAAA | |
| | GACAAAUACUGUAUCAUAUCACUUAGAUUUGGAAUCUAAAAUAGUCAAAC | |
| | UCAUAGAAACAGAGAGUAGAAUGGUGGUUGCUAGAGAUUAGGAGGGGGAA | |
| | AAAAUUAGAAAUGUGGGCCAAAGGGUAUAGACUUUCAGAUAUGCAGUAUG | |
| | AAUAAGUUCAGGAGAGCUAAUGUGAAUAUUGAAAUUUCCUAGGAUGGUAU | |
| | CAUGUUUUCACCACAGACAUAGAAGAGAAAAUGGUAACUCUGUGAGAAGA | |
| | UGGACAUGUUAACUAGCUUGUGUAAACCAAAAAUAAAAUUCUAAGCCUCU | |
| | UAACCAACUGAUGGACCCUCCCUCUUGGCCAAAGGGACCCCAAAGAAAUC | |
| | UGUUCAGGCCAUGAUGGGAAGGGGGCAUCUGACAUGCCUUGGUAUAUCCU | |
| | CUUCCCUUUGGAAUUUAGGCACAACUGACCAGCUUUAACAUUAAAUAGAG | |
| | AUCUUAAAACUGACAAAACACUUUUUGUAGCAAUAAAAUACCAAAUUCCA | |
| | ACCUUAUGCUGGUGAAGCAUCACAUGACAGAUAGGCCCUGCAGAGGAUCA | |
| | AAGUAUUUUACCCCUAAAUGUAUUUCUUUGACAUAUUUUGAAAUGGCCCU | |
| | GCAAAGCUAUCUCUUGUCAGGGAAAUUUGCAUUCUGUAGACAAUCUCCUU | |
| | CUCUUAAAAAGUCUUUUCUGGAGAGACUGACAUCUGUUAAGGUCCAAUAA | |
| | GAGACAUUUACCGUCUAUUCUUUCUGAAGCCUGUUGGUGGCUUCAUCUAC | |
| | AAAAAAAAAAAAACAUUGACUUCCUUUCCUUAUUUAACUGAAUUAUUUCU | |
| | UUAUGCUGAGUUUAACCCUUUAGGCAAAGCUUAAUUCUUUCAACCAAUUG | |
| | UCAAUCAGGAAAUUUCUGACUCCACCUAUGACCUGAAAGUAUUUAGUUUG | |
| | AGAUGUCUGCCCUUCCGGGGCUAAUUAAUGUUACAUACCUUACAUGUAUU | |
| | GAUUUAUGCCUUUGCCUGUAACUUCUGUCUCCCUAAAAGGUAUAAAACCA | |
| | AGCUUUAACCCAACCACCUUGGGCGCAUGUUCUCAGGACCUCCUGAGGUG | |
| | GUCACAAACCAUAGUUCUCAUAUUUGGCUCAGAAUAAACCUCUGCAAAUA | |
| | UUUUACAGACUUUGGGUUUUUUGGUCAAUGCUUGAUUGUGAUUAUUAUUU | |
| | CACAGAAUAUAUGUAUGUGAAAACAUCAAGUUGUAUACCUUAAAUAUAUA | |
| | UAAUUUUUAAAAUUUGCCAAUUAUGCCUCAAUAAAUGUGAGGAACAAAAG | |
| | AGGUUACAGUAUGAUGAAUUUAAUAAACUCCUUUUAUAAUAUAUUUAAAU | |
| | AGCAACUUUUGGUGUGUAAAAUGUUGCUAUUUUUACUGAAUAUGCAUGAG | |
| | AAUUUUUCGAUUAAAAUAUUUAUAUAUGUAAUUUGAACACAAAAAUAGAA | |
| | UUUUAACUUUCUUUAGUUUUGAUAUAAAUGCUUUAAAAUAGAAACUGCAA | |
| | CUUUAAAUUUUAAUUCUGAUUUUUUCCAGAAUUUGACUUGAAGUAUUUUA | |
| | AAGAGGAAAAUCUUUUAGCGUAGUUCGAAGUUGGGUAGCAUGAUGUCUCC | |
| | AGCUUUGUUCUUUUUGCUUAAGAUUGUCUUAGCUAUAUGGGCUCUUUUUU | |
| | GGUUCCAUGUGAAUUUUAACAUAGUUUUUUCUAAUUCUGUGAAGAAUGCC | |
| | AAUUGUAGUUUAAUGGGACUAGUGUUGAACCUAUAAAUUACUUUGGACAU | |
| | UAUGGUCAUUUUCACGAUAUUAAUUCUUCCUAUCCAUUAGCAUGGAAUGU | |
| | UUUUCCAUUUUUGUGUGUGUGUGUGUCCUCUCUGAUUUCCUUGAGCAGUG | |
| | AUUUGUAGUUCUCCUUGAAGAGAUAGAUCCUUCACAUCCCUUGUUAGCUG | |
| | UGUACCUAGGUAUUUCAAUCUCUUUGUAGCCAAUUGUGAAUGGGAGUUCA | |
| | GUCAUGAUUUGGCUCUUUGCAUGCCUGUUGUUGGUGAACAGGAAAGCUAG | |
| | CAAUUUUUGCACAUUGAUUUUGUAUGCUGAGACUUUGCUGAAGUUGCUUA | |
| | UCACCUUAAGCUUUUGGGCUGAGACAGUGGGGUUUUCUAGAUAUAGGAAC | |
| | CUGUCAUCUGCAAAGAUAAUUUCACUUCCUCUCUUCCUAUUUGAAUACCC | |
| | UUUAUUUCUUUCUCUUGCUUGAUUGCCCUGGCCAGAACUUCCAAUAAUAU | |
| | AUUGAAUAAAACUGGUGAGAGAGGGCAUCCUUGUCUUGUACUGGUUUUCA | |
| | AGGAGAAUGCUUCCAGCUUUUGCCCAUUCAGUAUGAUAUUGGCUGUCGUC | |
| | UAUGGAUCUUAUUAAUUUUGAAGUAUAUUCCUUCAAUACCUAGUUUAUUG | |
| | AGAAUUUUUAACAUGAAGGGAUACUGAAUUUUAUCAGAGGCCUUUUCUCC | |
| | AUUUUUUGAGAUAAUCAUGUGGUUUCUGUCUUAGUUCUGUUUGUGUGAUU | |
| | AAUUAUAAUUAUUGAUCUGCUUAUGUUGAACCAACCUUGCAUCCAGGGAU | |
| | GAAGCCAACUUGAUUGUGGUGAAUAAGCUUUUUGAUGUGCUGCUGGAUUC | |
| | GGAUUGCCACUAUUUUAUUGAGGAUUUUUGCAUCAGUGUUCAUUAGGGAU | |
| | AUUGGCCUGAAGUUUUGUUGUUGUUGUAUCUCAUCCAGGUUUUGGUAUCA | |
| | GGAUGAUGCUGGUCUCAUAAAAUGAGUUAGGGAGUAGUCCCUCCUUUUCA | |
| | AUUUUUUUGGAAUAGUUCCACUAGAAAUGGUACCAGCUCCUCACACCAGU | |
| | UAGAAUGGCAAUUAUUAAAAAGUCAAGAAAUAACAGAUCCCGGCAAUGCU | |
| | GCGGAGAAAAAGGAAUGCUUUUACACUGUUGUUGGGAAUGAAAUUAGUUC | |
| | AACCAUUUUGGAAGACAGUGUGGUGUUUCUUCAAAGAUCAAGAAGCAGAA | |
| | GUAUCAUUUGAUCCAGCAACCCCAUUACUAGGUAUAUACCCAAAGGAAUA | |
| | UAAAUCAUUCUGUUAUAAAGAUACAUGCCACAUAUGUUCAUCACAGCACC | |
| | AUUCACAAUAGCAAAGACAUGGAAUCAACCCACAUGCUCAUUAAUGAUAG | |
| | ACUGGAUAAAGAAAAUGUGGUACAUAUACCCCAUGGAAUAUAUGCAACUA | |
| | UAAAAAGUAAGAAGAUCAAGUCCUUUGCAGGAACACAGAUGAAGCUGGAG | |
| | GCCAUUAUCCUUAGUGAACUAACACAGGAACAGAAAACUAAACACCGCAU | |
| | GUUCUCACUUAUAAGUGGGAGCUGAAUGAUGAGAACACAUGGACACAGGU | |
| | AGGGGAACAACACACACCGGGGCUUGUUGGGGGCAGUGUGGGGAGGGAGA | |
| | GCCUUAGGAAGAAUAUCUAAUGGAUGCUGAGCUUAAUACCUAGGUGAUAG | |
| | GUUGAUCUGUGCAGCAAACCACCAUGGCACACGUCUACCUAUGUAACAAA | |
| | CCUGUGCAUCCUGCACCCGUCCUUCGAAACUUGAAAUAAAAUUUGAUGAA | |
| | AAAAAAGUAAUCUCACUUCCAUAAGAGGAUGAAAAUGUAUGAGUAGGGCA | |
| | UUAUUUAGGUGAACUGUUCAUAAGAUACCUCAUAACAUCACAUUAUGGCU | |
| | AACAUUAAUUUUUGUUGUUUGGACAGUCUAGCCUGGACAGACUUUGUCUU | |
| | UGUUUUUUGUUAAAAACGAAUCUUGCAAGAAAAACAGAAGAAAAUCUUAA | |
| | AAAUUUUAUAGCAGCUUUAUUUUAAAAUUGAUCGUGUAUGAAUAAAUUAC | |
| | CAUUUUAAAUGUGAAUUCCCUUUUUUAAUGGGAGUUUUAAUAUAAAUGUU | |
| | CAAAAAUAGUUAAUCAUUAUUAGAAGUCAUUUUAAUAUUCUAUUAUUUCA | |
| | AUGUUUCUAGUAUUUACUAAAAUAAACUGCUUCUUUAACAUAAUUUAUUU | |
| | UUCUAUAGAAUUACUAUAUCAGGCUUGCUAUUUGUGCUCAUAAACUUGUC | |
| | AUGAAAUAACUCACAAAAAAGUUUAUAAUCUAAAGAUAGUGACAUAUGAA | |
| | AAUGAUUUUACACUUUUAUAUAUUUAAAAAUCACAACUAUGCACAAUUUC | |
| | UAUUGAAUGGUCAUUAAUGUAUAUACAUGUGUAGAGGGAUAUUAAGAAUU | |
| | CUGAGUGUACAUGGAGAAAAAUUCUCUUUCAGCCAUUUUUCCUGAAUCUA | |
| | AUUUUUGGCAAAAUAACCAUUAAACUAUUUUUUUCUGCCAAAAAUGUGAU | |
| | UUGAUUUUUUUUUUAAAGUAAAAGGAAUGGGGUGUGGUUGGGUGUGGAUA | |
| | UAGAUAUUUGGACAACACAAAUCUUUAAUAAAGAUGAGCAAAGACCUUGA | |
| | AAUGAUGCCAUCCUUUUUUCUUGCUCUUUAUUUCUCCCUAACCAACAGAG | |
| | ACAUUCCAAAAUUCCUCUUACAGUAAACUUACUUUAAACUUAUCUACACA | |
| | GUAAUUAACCUUUUGUUGUUAGCUAUCAGAACAAUGGGUAUUCCUUCACA | |
| | AUGAAAUUUUGAAAAUAAUUACCAGGUCUUGAUAUGGUCUUUUAAAGAGA | |
| | AAUUGAAGUUUCUUUUGGAGAAUUGCUAAGGAAUUAUCUAAAUUGUGUAA | |
| | UUUUUUUUGCUUUCCUUGGUGGUUGGACAUUAAUUCAAACUUUGGCAUUU | |
| | UAUGUGUUUGCCAAAGGAACCUUAUUUAAUGGAUUUGUCUAUGAAUAGAC | |
| | GCUGGAAUAGGCUUGGCUUUCUGGAGAUGCUUGGGACUUUCAGAAAAUGG | |
| | GUAACCAGAAAAAUGGCUUGCUGCCCUUCAAGAAUAAAUAGUGUCCCACU | |
| | GUAAGGUCAAUUUGGCUUCAUCCUCACUCCCUUAUAUACAUGACUAAAUA | |
| | AGGGGAAAGCCUGGGAAACCAUUUCCCAGUUUCCCUUACCAAGAGCGUUU | |
| | CAGGUUAAAUUCUCCUAGUGGGAAGCAGUAGGACUCAAUUUGGAAAUUGA | |
| | AAGAGAAGAAGCUGUUCUCUGGCAGCUCCUAUAAAGGAGGCUACAGUGGG | |
| | CACGUCUUAAUUUCCUGAAUUCUAUCAGCAGUUUCCCUGACUUUUGCUCC | |
| | CUCAGCCCUUCUCAUGGUAUGACCCACUAAUUCCCUAUAUUAAACCCCUU | |
| | UCAACUUGAUACCUAUAAGUUUUAUUUUUUCUUAAUAAAAUUCUGAAUGG | |
| | CAACCCCAAAACUAUUAAAUCCAGGAAUUAUUUCAACAAAUGCAAUGAGA | |
| | AUAUGGUUAAAAAGUUUUUAGCAGACUGUGUGAUAAGAAGAUUGAAUACA | |
| | CACAGAUUCUUUUUCUGUCACCAUUGUCUUUGUUGUGUUUCCCUAGAAGC | |
| | ACACCUGGAGAUUAAAAUUUGAUAAAAAGAUAAUUCCAGGAAGCACUAAU | |
| | AGGGCAAGCAGAAAGUAAUAUAGGGAAGAGAAGGAAGCUAAUACCGGGGG | |
| | AAAAAAAAGCAUGUUAUUGUGGUGGGCUAUUACCUGUUGUAGUUGGUUCA | |
| | UUUAUUUGUUACUAGCAUAAUUCUAACUGAUAUCAUGGGUCAUUGUGAAC | |
| | AAAGGCGUGUUUUUUUGGAAUUAAGGAGCCUAGUCUGCCUGCAAUAGGGA | |
| | GGGGAUUUACAGAUUUUGGAGAGCGCUGAAUUCCAAGGAGUUGGUGUUGA | |
| | CUUGCCAUUUGUCAGAACAUUUCAGAGACAAGCAAAGUGAAGCCCAUUAG | |
| | AUUGAUUACACUCACCUAAUGAAAGAGAAUUUAGAAUUUGAAACAUUGCA | |
| | GAUAUUUAUUACCACUGACCAAAUGUAAUAUCAAGACAGCUGGCAAGUUC | |
| | AAGUGGAUGAGCAUAGCAAUAGAAAUGGCUUGGUCUUUUGGUAAAGACCU | |
| | AAAAGAGGAAUGGCUGUAGAAAGAUACAGAUGUUUGAUGAUAGCUGCAAA | |
| | GUAUACUCAAUGAUUGACAAAGAAAGUAUUUGUUAUAAUUUUCUCAGAUC | |
| | CAAGUGGAUCUGUAUAAAGAUCUAAAUAGUACAGUUUUCUAUAUCAGGAU | |
| | AGUUUGAUGCCAUUAUUGAUUAGUAGCUGCUAUCUUUUUUUCCUGUUUUU | |
| | GUUUUCUUAAUCUUCUUUUGUAUAAAAUCUUAAUUAAUGUCUACAUUUUU | |
| | GGCAUGUUGGCUGGCUGGCAUAUUUAGCUAAUCCAGCAUAUUCCUUGGUG | |
| | GCCUUAUUGGGGAAAAGUGUUAGUUUUUCAAAGUUUUUUUUUCCUAUUUA | |
| | CUGUUUCCAAAAAGGUUUUAAGUAAAUUCCAUACUUCUUUUUCUAACUAG | |
| | UGGCAGUUGAUUCUAAUAAAUGUAAGCAAACCAUAUUGUAAAAGAUAGCA | |
| | AUUUGAUAUCACAUACAUACAAAUUAAAUGCAAAAUACAACAGCCCAAGA | |
| | AUCCCCAAAAAGAUAUGCGACUGCACAGAAACAAGAAGCACAGCCCUGUG | |
| | CUAGUUAUGAACCACUUUUGGAUUCCUUGUGUUGACAUGGAGCAGAGCCG | |
| | UGGGGACAUGGAUUUUGGAGGAGCUGACCACUUUGGAAUAGUAGCAAGGA | |
| | AGAAGUAUAUACCUAUUUCUAGAUAAAAUUCAGAAGGCUUUUUUCUGACU | |
| | UUUGAUGACAGUUUGAUUAUUGCAGUCUACAAUGAAGAUUCAUGAAAUUG | |
| | AGUUCUCAAAGAUUUCAAGAAUAAAACAACCUAUACCGUUUGAAUAUUUG | |
| | AUCAGUUUUAAAUAUUUGGGAUUUGAAAGGCAAAACUAUGUAAAUUUCCA | |
| | UAUGCUAUCACUAAAGGCUGGUAUUUUAUUUAAUAAACUUUGUCAAGAGA | |
| | CUAACUUUUCAAAACUCAUUCUUCUUUUUUACGAGAAGAAGUGAAAGGAG | |
| | UAGAAAUACAGCCUGUUGAUGCCCACAAACUUAUCCUAAGAGUUUACACA | |
| | UAUCUUGUUAAGCUUCUCAACAAUGCUAUAAAUUGUGGGUUUUGUCCCAG | |
| | CUUUACAAAAGAGGGUCAUGAGGCGAAGAUAAUUUCUUUAGAAACUUGAU | |
| | UAAGAUCAUGAAAAUAAAUGUGAUAGAAUUAGGAUUCAAAUCCAGGUUUA | |
| | UAUUACUGAUUGAUUCAUCCAAAAUGUUUAUUUACUAUGUGCCAAAUCUU | |
| | AAGCUAAAUAUUGUAUUAGUUUGCUAGUGUAUCCAUAGAAAAAUGCCACA | |
| | GACUGUAUAGCUUAAAAAACAGAAAUAUAUUUUCCCACAAUUCUGGAGAA | |
| | UAGAAGUCUGAGAUCAAGAUGCCAGCUGGGUUAGUUUCUUCUGAGGCUUU | |
| | CAGAAGAUGGUUAAGCCAAACUGUUAAUUUUUAAACAUCAUGAACUAACU | |
| | UGUCCUCAAAGAACUUCAUCAACUUGAACAUUUUCAAAGAGCUCUAUAAG | |
| | GCAGCUCAGCAUGGCAGUUUUUUUACUGAAAUAUCUUAUCUGGAAGAUGG | |
| | CAAAACAGACCUGGACCUUCACAAGCCAAUGGUUGCUUGUAUUCAUAUCA | |
| | CAGUUCACUUGGGUAAGUGGUAACAACAGAAUAAAAAGCAGAUUGCCUCC | |
| | AUACUGGUUGGGUGAGAUAGCUUCAUUUUUGGAAAAUCAAUUGAAUCAUG | |
| | AAAAUCUUCCCAAUGGUAUAAUUUGUUCCGGAGUUCUUUUGAUAGUUAAG | |
| | AAGGGAAAUAGUAAUCAUUGUCCACAGUCUUUAUUUAUUUCUUUUUUUUA | |
| | CAAAUACUCUUAUGGCAUUCUCGAGCCAUCAUUCUAUGGUGUGGUGACUG | |
| | AUUGUACUCCAUGCAGGUCACCUCCUUGCCAUGUCUUCCCAUGGUGUUCC | |
| | CUCUGUGUGUGCACAUCUGUGUGCUAGUCUCCUUUUCUUUUAAGGACAUC | |
| | AUUUAUAUUGGAUUAGAGCCCACCCUAAUGAUGUGACUUUAACUUAAUUA | |
| | CCUUUUUAAAGACUAUCUCCAAAUGUAGUCACUUUCUGAGGUAUGUCAAC | |
| | CUAUUAAUUCUGGGUACAAAGUUCGGCCCAUAAAUGAUGUUAUGGACCCA | |
| | AUGUCUAACAAAGGCCAAACACUCUCCCUGACUUCGGAGAAUUUAGUUUA | |
| | GUAAGGGAGAUUAGCAUUAAGCAAAAAAUUACCUAUAUAUAUAUAUGUAC | |
| | AUUGCUCUAGUAAUAAGAACUCUGAAGGGGAAUUAAAGGAUGUUACAAGA | |
| | GUUUGAACACAUCCAUGGGGAUAGCAAAGACUUUCUUGAGGAAAUAAUGA | |
| | CCCAGUUAACUCUGACAAUGAAAAGGGCAGUGAAGUCUGGUCCAGGCAGA | |
| | UAAUCUACUUGUGCAGGGAAAGCUCCUAUGCGGAGGGAGCUUAGGGAAUU | |
| | UAAGGUUAGAAGUGAGAGAAGCCUUGUCAGCUUUUGGUUAGAAAUUUGGU | |
| | CUUUAUUCCAAGAGUAAUUAGAAGCAAUUGAAAGUUUCAUAGUUGAUUUG | |
| | UGUUUUGAAAAGAGUACUCUUUCUGCUUAUAAAAUACUCAGCUGAUUAAC | |
| | CACAUUUUUUAUUGACUUUUCAAUUGGUGGUGGUUCUAUCAUGCACACGC | |
| | AGAAAAAUUUAAAAGUUAGCUUAACUUUUUAGGACUCUCAUUACUUCCUA | |
| | UUUUCUAGCUUGAAGUUUGCAAGAAGUGAAAAAAAAGAAUUAUAAAAUUU | |
| | UACUUCAACCUUUGAAAGGAAGAUUCCAUUAUUUAGACAAUUGGAAAAGA | |
| | AGACAAAAGACUAAAAACAUUGUUGUUAAUCAGGAUCUGCCUUAGAGUUA | |
| | AAUCUUUCUUUGGUAUUUCCUGUCUGUCUCCACAAAGUUGUCAGAUAUUU | |
| | GGACCUAUUCUUCAUACGAUGAACAUUACUAACUGCCUUUAGUCCCAGUA | |
| | GGAACUAUGUGCUUGCACUGAAGAAAAAAAAUUGUCUGAAAGGCUAAAUA | |
| | CAAAUAUAGUAAGGUAUAUAUGUAUAGAAGUUGGUGAUUUAUCGGGGCAC | |
| | CUGCCCUGAUAUUCACGUAGGUUCUUUUCUAUUUUCCUUAAGUGUCAGCC | |
| | AGCUUGAGAAAUAAAGGGACAGAGUACAAAAGAAAGAAAUUUUAAAGCUG | |
| | GGCAUCUGGGGGAGACAUCACAUGUCGGUAGGUUCUGUGAUGCCACACAA | |
| | GCCGCAAAAACCAGCAAGUUUUUAUUAGGGAGUUUCAAGAGGGGAGGGAG | |
| | UGUGCGAACAGGUGUGGGUCACAGACAUCAAGUCCUUUACAAGGUAAUAG | |
| | AAUAUCACAAGGCAAAUGGAGGCAGGGCGAGAUCACAGGACCACAGGACC | |
| | CAGGGGAAAUGAAAAUUGCUAAUGAAGUUUUGGGCACCAUUGUUAUUGAU | |
| | AGCAUCUUAUCAGGAGACAGGUUUUGAGAUCAACUGGUCUGACCAAAAUU | |
| | UAUUAGGCGGGAAUUUCCUCUUCCUAAUAAGCCUGGGAGCGCUAUGGGAG | |
| | ACUGGAGUCUAUUUCACCUCUGCACUCUCGACCAUAAGAGAUGACCACGC | |
| | CCAGGGGAGCCAGUUCAGAGACCUACCCCCAGGUGGCAUUCUCUUUCUCA | |
| | GGGAUGUUCCAUGCUGAGAAAAAAAAUUCAGCGAUAUUUCUCCCAUUUGC | |
| | UUUUGAAAGAAGAGAAAUAUGGCUCUGUUCCACCCGGCUCACCGGCGGUC | |
| | AGAGUUUAAGGUUAUCUCUCUUAUUCCCUGAACAAUUGCUGUUAUCCUGU | |
| | UCUUUUUUCAAGGUGCCCAGAUUUCAUAUUGCUCAAACACACAUGCCGUA | |
| | CAAUUUGUGCAGUUAAUGCAAUUAUUACAGGGUCCUGAGGUGAUAUACAU | |
| | CCUCCUCAGCUGACAGGAUUAAGAGAUUAAAGUAAAGACAGGCAUAGGAA | |
| | AUCACAAGGGUAUUGAUUGGGGAAGUGAUAAGUGUCCAUGAAAUCUCCAU | |
| | AAUUUAUGUUUAGAGAUUGCGGUAAAGACAGGCAUAAGAAAUUAUAAAAG | |
| | UAUUAAUUUGGGGUACUAAUAAAUAUCCAUGAAAUCUUCACAAUCCACAU | |
| | UCUUCUGCCAUGGCUUCAGUGGGUCCCUCCAUUUGGGGUCCCUGACUCCC | |
| | GCAACAGUGAUUAAAAUAUUAAGUGCUUCCAAAUGGUACAAUUUGAGAUU | |
| | CUGUGUAUAAAAUUGAGUAUGAAUGAUUAAAAUAGUGAAGUAGUUUCCAU | |
| | CGACUUCUGAAAACAAAGAAGCUUUCUGUUUGUUCAGUUUCUUUUUUAAU | |
| | UUUAAAAAUUUAUGACUAUUUUUAUUACAUAAUAUUCAAUCUUAUAAUUG | |
| | ACAUUGAAUGUAUUUUUUUCAAAAUAAAAUUUUUCUUCACCUUCAAAAAA | |
| | GACUUCUAUUUUACUAAAAUGAUGUAGAAACCAGUUAGCCUUAAGUUUAA | |
| | AUGGAGACCAAUAUAUUAAUUUUCAAGUUACAGAAUUCCUACCAAAGAGG | |
| | GGAUAGCUAUAGCUAUCUAACACCCUGUGAGAAAUAGAAUGAUAACAGUA | |
| | AAUAUCAGCCAUAACAAAGUUAUCAAAUUCCUCUUGUUUCAUAGGAGUAC | |
| | AAAGAAAUCAUGCUUUAUCAUCAAAUUCCUCUUGUUUCUUAGGAGUACAA | |
| | AGAAAUAUGUUAAAGUAUGAUAUUAAUAGAACAUUAAUUGGUAAAAGUCA | |
| | CAAUCUGUAUUUUGUAGAUCUGUACAAUGAAAAAAUGAAUGACUUAAUGU | |
| | AGACAGGUGAAUAGUUUUAGGAAAUGAUUAGACUUUCAAUAAAACACAAC | |
| | GUUGCAUAGCUAGCAUAAAGCUAGUUAAAAUAUGAGAAAUCAAAAGCUGC | |
| | UUUCCUGAGGCUAGCCAAAUGACGAGAAGUGAGGUAAGUCCAGAGUCUGA | |
| | CCCAAAUUAAAAUCUGUUUCCAGACUCAAUCUGAAUGCUUCCUUUUUCCU | |
| | UUAUUGCUCAGAGUAGAUUUUAUAAGUAUUGCCUGGAAGAAGAAGCUAUA | |
| | UUAUAUAUUAAAAUAUAUGCUAUUCUUUCUUUAAAAAUUCAAAUAAACAU | |
| | AUUUAGUUCACAUCAUUACUCAUGUUUGUGUUCAAGGGUAGAUAAAAGAG | |
| | GAGUAGGGAAAGUAGUACUCACUUGAGCUGAUAAAUAUCUCUAAGAAAAU | |
| | UUUAAAAUACAUGUUUAAAUUUAUGUGUAAGUUUUAUUAAUUUUUAUUUG | |
| | ACAUUUAAAUGUAAAAUAUUUUAUCACUCAAAUAUAUUUCAGCUAUAAAA | |
| | UAAAUAACAGUUAAGGAUUUAAAAAUAUUUAUACUCUGAACUGUAGAAAU | |
| | AUUAGUCCCUUGAAAGAUCUCUUUAUUUCCAAAAUAUUUCUAUUGCAAGU | |
| | GUCAGAAAUGGUAACUAUAUAACAAUUGAGAACGUAGGAAAUUAUUUAUU | |
| | CAUAUAUGAAUUCCCACUCAUAAAUUUUGGCUGCCUUCACUGAAGGCUUU | |
| | CACCAAAGUGCUAUCAAUUUUCACUUCUCCUUCAUUCCCAUGAUGUCUUG | |
| | CAGAAACAAAAGGAGGAAGAAAAAAUAAUCUAAAGAUUGAAUGGCUGUCC | |
| | CACAGAUUCACAGCCAAAAUUAAAACAAGAACAUUUUUGGCCUACUUAAU | |
| | AUACUUACUUUCCCCAAAAAGAAUCUCAUAAAAAUUGGUACCAAUUAUUG | |
| | UUACACAUAAAAAUGCAGACCUAAUUUCCUUUACAUUUGCUGGCACAUAC | |
| | CUAGUCUUGUAAGAAAGUGAAAAUAGUAUGCUUAUACUGUGUAUACAUGU | |
| | GGAGCUCCCUCCACACAGGAGCUUUCCCUGCACAUAUAGCUCUUUGUACA | |
| | GUCUAAAGUGCACCACCACUUUACUAAUAAUAUUUUUGUUGUAAUGUUAA | |
| | UUUUAAAUUUUAAUAUUUAACUUUCAAUAAGAUCAAAAUAAUAUCCUAGA | |
| | GUUCUGUGGAAGAAGAGAAAAAAUUAAUCAGCACAGCUAUUUUUAUAUAU | |
| | UUAAAGCAAGUUACCAGUGACAUACACAGUCAUCUGUCUAAUGUGUGUUC | |
| | UCAGGGGAUGUUUUUAUUUGCUCCAUUUUAUUUGUCCUACAUAAAACAAA | |
| | UACUGUUAAGUAAAAGAAUAUAAGAAACACAUGAAUAAAUUUAGACCUUU | |
| | CUUUUAAGAGUGAUUAAAAUGUUUCUCUUAGAAGAGUAGUAUUUACUUCU | |
| | UUAGGUAACUAAUGACUAAUAUUUUUGCUUUCUCCAGGUAACUAGUGAAA | |
| | GUGUUUAAAUAUCUAGAGUUAGAACCAAAAGACAGGAAAUUAUUUAAGUU | |
| | GUAAAAUAAUACUAUAAUUGAUAUAUUAUACCAAAAUCAAUUACAAUCUC | |
| | CCAUAGGAUCAGAAACCAUGAAAAAUUAUGUAUUUCAACAAUGGGAACAU | |
| | UUUUAAACUGAAGAAAAUAAUUUUAAUAAAACCUUAUUAAUAAUUUUAAU | |
| | AAAAAUACACCUAGCUCAAAACCUUUCCCUAGUAACACUUUAGUAUGUGU | |
| | ACUGAACUGUUCAUCUUAAGAUAAUGGUAAGAAAUUUUUAUAUGCUGUGU | |
| | UUCAGUCACAAAAAGAGGAAAUGCAUAAAUUCAUACAAUUCAUUUUUCUA | |
| | CUAAACUUAAACUUUUAGUUCCAAAAUGGAAAAAUAGCUAAUUUACUGAA | |
| | AAUCUGUUAUAAAUACUAUUUGAUAAUUAUUUAAAACUAAAACUUCUAAC | |
| | UCUAUAUUUACCUUCACUAGGAUAUUCUAUGCUUUCUACGUCAUUGCUUA | |
| | UGAGUCUCAUGUUUUGAUAAGACAAAAUUGUGUAAGUUAAAAGAUUAUCU | |
| | UUGUAUCAUGGAAAGAUAAUGGUAUCUAAAUUUGGAAAGAUAUAUUUUAA | |
| | CUGAAAAAUGUGCUCAACCAGAAUUAACAAAAUAUAUGAAAUCCAGGUCU | |
| | ACCAUUUACUAACUCUGUAAUAAAGUUUUUAAUUUCUUUGAGUUUCAAAU | |
| | UUCUCACCUAUAAAAUGGCAAUGAUAAAAAGCAAUACCAUAAGGCUACUG | |
| | UGAAAAUUAUAAGAGACUUAGAAAGUGCAAUGCAUAAUGUUUGAUUUAUU | |
| | GUAGUUAUUAUUUAAAUUUUUAACAGUAUGUAUAUAUAUGUAAUAUUGGA | |
| | UUUUAUUUUAUUAAUUCGAUUAAGACAUAUUAUGUAGAAAAAUAAACUUC | |
| | CUAUGCCAUAUAUAACACAAAUGUAUUAAGAAACAAUUGUGCUAAAUUAA | |
| | GUGAAGUUAAAAAGCGUAUGAUUCUUCAUAACAAAACUAUAUACAAUCAU | |
| | UUCAAGAACAGUCAAAACAUAUGCUAGGCAAUAGAGUGCUGAAAAAUGUU | |
| | UGGUAUCAUCUCUUUGAGAAGUGAGGUAAUUUUUCGCUUCUUAAAACAUA | |
| | AAGAUGGAUUUAGGAGUAAUAUAUAUUCUUUUCUAUAUGGGUAGAUAUAG | |
| | ACCAGUAAAAGUGAAUCUAUGCAUUGAGGUAAUUACAUGUACAUUGAAAA | |
| | AAAAUGAAGCUAAUUUAAGAAAGUCUUCUCUCAUCUAGAUAUUUUAGCUC | |
| | AAAUGCCUCAGGAAUAAAUUAUCUCAUAUAAGCAAAUCACUUAUUCUCUU | |
| | GUCUUUACUAAUAUAGUUUUUGCUUAUUGUUUUUAUGACUCUUGAAUUAC | |
| | UAUUGAGAUAAUAGAUAAUGCACAUGCCUUAAUCUAUAUUUCAAAGAAAA | |
| | AUUUAAAAUAUUUUAAAUUCCAUGUUCUUCUUGUAGUUUCUUAAUCAAGU | |
| | AUUUUGCCUAUUUCUCAAACAAAAUGGUAAUUAAAAAAAACACCUGUAAU | |
| | UUCCAGUUUCUAUUUUUCACUUUUCCCCUUGCUUAUUUAGAGCUGACUCU | |
| | GACCAAAUCUGUGAAGCAGUGGGUUUGUGUUUUCUUCCUGGUUUCCUUAU | |
| | GUAUAGAUGACAGUAUCUAUCCCUGGGCAGUGCCAGGGCAUGUCCUUAGA | |
| | GCGGUUUUUUGAGUAGUAAUGAUGGAUUUACAUUGAUUCAUCUAUACUCU | |
| | UGGCCUAGUUUCUUUCGUGGCCAUCAUCCUGCCUUCCUGGAAUCCAGACC | |
| | GAAAUUAGUGGUUCUGGUUUUGCCUCAGAACUGAGUAAAAUUAGCUAUGC | |
| | UAGCUGGAGACUAGCUAAACUGGCUCCAAGUAAACCAAAAGUAGAAUUGC | |
| | CCUUCUCCCUUCUCCAACCUUCUCCUUCCUAACCUUUCCAACAAAUCAUA | |
| | GAUGUGUCUAAGCUCUUAGAGUUCUAGGGAAGUUACCUGUAUUUAAUCUU | |
| | GUCCUUUCUCUACAGAUAAGACUCUAGGAGACUAAGACUUAAGGAAAAAA | |
| | UCUCUAAGUGAUGUGUGUUUUAAAAAGAAAGCCCAGGAAUUAUAAACUGU | |
| | ACACAAAUAAAGGACAUUGUAUUUUUAACGUUCUCUACUUCAGUUGUACA | |
| | CUGUCCUACUAAAAGUGAUGAUAUCUUCAAUAUUCUGCUAGAGCCACUUC | |
| | UCACUUCAUGUUGCCUUGUAUAUUUUGCCUUUAAAAUAUUCAUAAACCUU | |
| | UCAAUUGUUUAACUUUUACAUUUUCGGACAACCUAGUCAUCAGAGAACUC | |
| | AUAUUUCUGAGUUCCUUGCUUAAACAAUAUUUAGCCAGCUGAAGGUUUCA | |
| | AUUAAGAGACUUUAUAUUAGCCUCAGAUCAACAGUUCCUAAGAAACAAUA | |
| | GAAGCUUUAUCAAAUAAUCCACUUAUCAUCUCUGACAAAAGAACAUAUAU | |
| | AUUGUCUUUCCUAAAAAUAUAGGAUUGUUGUAAUAUGUCAAUCUCUCUAU | |
| | UUUCCUAAUAUGUUCAUUAGUUCACUCUUCAUAUCCCAGGGGAUAAAAUG | |
| | UCUUGAUUACCUGAUUAGGAAAUAUAUUUGCUCAUUAUUCCCUGAAAACA | |
| | UUUUGCACUGUGUAUAUUUAAUGCUGUUUAUACAAAAGAAAGGCCUAUUU | |
| | UUUUUUUAAUCUACUCCAACAAUAUGUUUGUUCUUAAAUCUUCUGGCAUA | |
| | ACAUUCUGUAUUUUCCCUGCCCCAGACAUGAAGUUAACCACUUCUCGAAG | |
| | GCUCCUUUUGUUGAAGGAAGGUAGUUAGAAGUAAAGAUCUGAGGAGUAGA | |
| | UUUGCUAGUUGGUGUUGCUGUCCACCAUUUUGGUGGACAAAGCUAAAUUU | |
| | AUUUUUAUGUCUAUCUAUGUGUUUGUUGAAAUGCAUGAGUUCAUACUGAU | |
| | AUACCCAAUUCCAAGAUGACAUCCCAGGGUUCGUCCUAGUUUUCUCUCUU | |
| | UCCAAAUUUUUAACUCCUUUCAACUACAGUAAUAAUCCUGACUACAAUUA | |
| | UUCUUAAUAUAUAUACUUAUUUGAUCAAUCCCCUCCAUGUAACCAGUCUU | |
| | CCAUUGCCACUGCUGCCCCCUUCCCUGCAUAGAUACCCUCUCCAUCUUGC | |
| | UCUGGGCUCUAACCCCACAGACCUUGCUAUCUUUCUCUAUAUGAGCGCUU | |
| | UCCUCAUUACACUUGUGCCCCAAUAGCUCACACUGGGCAGCCCUCCAAUA | |
| | CAGACAGCUAUCUCAUUCUGCUCAGGUUUUGAGACCACUUUGAGAGCACU | |
| | GAUGCUUCCCUGCCUUGCUUGGCAUCACCUAACGGUUUUGGGUCUGAAUU | |
| | GCCCGGAAAAGAAAGGGAACAGGAAGAGAAAGAGUAAACUUUGUAUGUUA | |
| | AAGAUUCAAGUUAAUGAAAAAGAUCCUACCAUUUGACAUUCCAUGGCACC | |
| | CUUUGGGAUGAGUUGCAUGUCCUCUCUUACUAAUAUUGUACAGUUUAGGC | |
| | AUGUUUUCUUCUUUUCUCUUAAAACAUUUUUCUCUCUUGGUUGCUAAGGC | |
| | CACAUCCUGUUGUGAUUAUUUUUAUUUAUUAUUGUUUUUUUUUCUAAUCC | |
| | UCUUCAUUGAUUUCCUUUCAUUUGGUUUUAAAACAUAGUUUUAAAUUUUA | |
| | UUUUAGAUUCAAGGGGUACAUGUGCAGGUUUGUUACAUGAGUAAAUUGCA | |
| | UGAUUGCUGAGAUGAAUGAUCCCAUCCACACAGGGAGUGAGCAUAGUACC | |
| | CAACAGGUAGUGAUAUGGUUUGCCUGUGUCCCCACCUGUAUCUCAUGUUG | |
| | AAUUGUAGCUCCCAUAAUUCUCACAUGUUGUGGGAGGAACCCGAUGGGAG | |
| | AUAAUUGAAUCAUGGAGGUGGUUU | |
| 2063 | CAAACCUGCACAUCCUGCACAUGUACCCCGGAACUGAAAAUUAAAAAAAA | RNA |
| | UUCCUUACUACUAUUUAAAAAAACUUUAUUAAAGUACAAUCAGUGUGCAA | sequence |
| | AAAAGUAUACCUAUCAUAAGAGGGCAUGUUGAUAAAAUUUCACAAAUUGG | of |
| | ACACAACCACAAAACCAGGAACAAAAUCAAGAAGCAAAACUUUACUAGUG | XLOC_ |
| | UCUCAGAAGCUCUUCUUAUGCACCCCCCGAGCCCCUGCCCCAUCACUACC | 005184 |
| | UCCUCCAUACCUCCAACAACAUCUAUUAGUUUUGUCUGUUUUUGAACUUU | |
| | ACAUAAUGGAAUCACAUAAUGUGUAAUAUUUUGCAUUUGACUUAUUUAUU | |
| | GCCCUCAACAUUAGGUUUAAGAGGUGUGCUUAAUUUUUUAAAAUUUAUUG | |
| | UGUGCUGCCACAAUAAAUUAAAUGUCAUUGAAACAUUAUUUGUAGGCACA | |
| | GUUUAAGGUAUCAGAAUAAGGUUCACCAUAGAGAAUUUGCAUUUGAUUCU | |
| | AUCAGGUCUCUAGGGGCACUGGGGCAUUGGUAGAUUGAUCAGAGGGUUUC | |
| | UCAAUCAUCUAGCUGAAACAUGAUCAUAAUCUGUUAAGGUCCACUGCCUA | |
| | UGACCCCACGCCCUCAACCCCUGGCCCUGCUUGAAUUAUCACUGAGGCUA | |
| | CCCUUCUGGCAGUCUCCUGGAUGUAGAGUAGGGGUGUGUUUACUUCUAUU | |
| | UUACCUUUGCAAUGAGAAAAUAGCCCUUUGAAGUUCUGGUUUAAGUUGGG | |
| | AAGACUCUCCUUUUGAAUGCCUCACCCUGGCAUGGCUGGGCUUUGAUUAC | |
| | AGUUCCCCCUUGACCCUCAAGGACAUCAGACUAAUAUUAACUUUUACUCU | |
| | GUGUGGUAAAUAUCCUCAGGGCAAAAGCAACUUUGACGUCCAUUAUGCAC | |
| | CUUUGGUGAGAAAAGUCCCCUUACACUUUGACUUGCUAUUUCCUUACUAA | |
| | CUUGGCAUUUCUUUAGUAGCAUCAAGAAAAUAAGAUGAUAGUUUUCCUUA | |
| | UUUUUAAAGCAAAGGUUUUGUUGAGAUAACCUUGUGAACAAUAUUACAGA | |
| | AAACUUUCAUAGCUACUUGCUAUGGAGAUCUUAGGUCCUUUCAUCCCACA | |
| | CUUGUUUUGGCUAUAAAAUUGCCUUUAGUACAUUCUUAAACUGAAGCUUC | |
| | UGAUGAUAAUUCUUAAGUUUGUGCUCCUAAGGGCCUACUGGGACCUAUUU | |
| | CUUUGACUUUUUCUCCCGAAGACACUAUCUUUCCCCAGUAUCUGAAUGUU | |
| | UUUGGCUUUGAGUAAAAUGUUUGCUUAUUUUAUGUAGUAGAUAUUAGUGU | |
| | CUUUACUGUUUUAUCUCCCUUUCAGAAAGGAACAUCUGAGUUUGCAAUAG | |
| | UUUAAACUGAAUCUUGUUUUACUGUCUUUUCUUCCUUUGUACUUGUAGGC | |
| | CUACAUAGAAUUGAUUACUUCACUUCUUUUGCUUUCUCUUGCUACUUGAU | |
| | CUAGGUAUUGUUAAUUAUCCACGGAUGAGGAUAAAUAACAAAUACACACA | |
| | CACACACACACCCCUUAGGCAUAUCAUAUUCAAACUUCAGAAAACCAAAG | |
| | ACAAAGAAAAAUCUCUAAAGAAAUCAAAUAAUAAAAACAGACAUAUAGAG | |
| | GAACAAGAAUAAGAAUUAUACUGGACUGUUUGUCAGAAACCAUGAAAGCA | |
| | AGAAGAGAGUGGAGUACAUUAUUUAAAGUGUUGAAAUAAAAACUUUCACC | |
| | AGGCUAGAAUUUUAUAACCAGCAAAAUUAUCCUUCAAAUGUGAAGGAGAG | |
| | AGGGAGACUUUUUCAGAGAAACAAAACUGAGGAAACUCAUUGUCAGUAGA | |
| | CCUGAUUUAUAAGACCAUGUUAAAAGAAGUUAUUCAUUAAGAAGAAAAAU | |
| | GAUAUAGGGCACAGAUCUACACAAAGAAGAGUGUCAGAGGAGAAAUAAAU | |
| | GAAGAUAAGAUAACAUUGUUUAGUUUUUUCAAGCUAAACUUUCUUAACUA | |
| | UAUAAAACAUAACUGUUUCAAGCAAUACCAACAAUGCACUGGGUGGUUAU | |
| | AGUAUAGGGGUAAGGGAAAUGAAAGACAACAGUGUGAAAUGAACAAGCAG | |
| | GAGCAAAUGGGAAUAUUCUGUUUUAAGAUAUAUAUACUACAUGUGAAGGC | |
| | AGACUUAGGUUACUUAAAAUAUAAAUAUGUAUUAUAUAUAAUAUAUGUAA | |
| | AUAUAUAUAAUAUGUAUUAUAUAUAUAAUAUAUGUAAAUAUAUAUAAUAU | |
| | GUAUUAUAUAUAUAAUAUAUGUAAAUAUAUAUAAUAUAUAUUAUCUUUAU | |
| | CACAUCUGGUACAGCAGCUGCAAUUGGAGUCAUCACUUUGUUAAACUUAU | |
| | GAUAAGGCACUGUCAUUCUCCAAGAUCCAUCUGUCUUCUGCACAGCCAAA | |
| | UGGGAGAGUUGAAUGGGAAUAACCACUCGUGCUUCUUUCAAGUCCUUGAU | |
| | AGUGGCACUAAUCUCCACAGUCCCUCCAGGGAUGCGAUAUUGUUUUUGAU | |
| | UUACUAUUUUUCUAGGUAGAGGCAGCUCUAAUGGCUUCCAUUUGGCCUUU | |
| | CUCACCGUAACAGCCCUCACCCUACCAGUCAGGGAGCCAAUGUGGGGGUU | |
| | CUGCCAGUUGCUAAGAAUGUCUAUGCCUAUUAUGCACUGGGGAAAUGACC | |
| | ACAGGAUGAGUCCGGGAACCCACUGGAUCCACUCUUUGUUGGACCUGAGC | |
| | UACAACUCCAUUAAUUACCUGACCUCCAUAAGCCCCUGCUUUAACUGGAG | |
| | GACCACAGUGACAUUUUGGGUCCUCUGGAAUCAAUGUCAGCUCAGAGCCA | |
| | GUGUCCACUAGUUCCUUAAAUGUCGAUCAUUUCCCUCUCCCCAGUGGGCA | |
| | GGUACCCUGGUAAAAGGCUGGAGGUCUCCUUGGGGAAGGAUGGGAGAAAG | |
| | AUUCACUGCUCAAAUUGUCGAUAACGUAGUGAGGUCCUUCCUCAAGGGUA | |
| | CCUGGCCUCCCCUUCAUUCAAGGAGUUCUGGGUCUGUAAACUGGCUCAAG | |
| | UCUGGAAAUCGAUUGAGGGGCCAUUAUUCUCUGUUUUUAUAAUUUAAAUU | |
| | AGUCUUUUGUCCAUUCGACCUAGAAGUUUUCUGCUAGUAUAAAUUAAGUA | |
| | CGAAUGCAGUAGGCUUCCUAUCAAUUUCACUUCUAGGAACACCGUGAUUA | |
| | AUUAGCCAAUGCCAUAACUCUACACGAGUCAGACCAUUCUGAUUGCCACU | |
| | UUGCCUCUGCUGUCCAAUAAGGUAGCUACGCCCACCUUGCCUUUGAAGGU | |
| | UGAGUGCCACCACUUGGCUCCUGCCACCUCAGGAUCUAAUUACUCCCAUU | |
| | GUAUUUAAAUUUUGUGGUUGAGUGACUGCAGUUCCCACUGUUAGAUCUGA | |
| | CAUACAGAGAAGAGCAAUUACAGGGCUCUUCAAAGAUGCAGGUGCCACCC | |
| | UCGCAAAUCUAUUUUGCAAGGCAUUGGUCAAGGGUGUAUCUUCUGGACCC | |
| | UCCCAGCUGGGAUGAGAGGUCUAAAGUGACUAAUCCACUCCAUCAUCCCA | |
| | AUCUCCCUAAGCCUCUGGAUCCCUUCCUCUCCAUUAAACCAAGGGAGAUC | |
| | AGGCAUUUCCAGCUUGCUUACAGUGGGCCAUCUUUUAGUCCAUAUUUCAG | |
| | CUAACCAAGCAAAUAAACUAUUAGAACAUUUUUUAACUCACCAAGCUGCA | |
| | ACAUUAGAAGCAGAGUUCCUAUGUAGUGGGCCCAAAUUAAUAAAUUCGGC | |
| | CUGAUCCAACUCUGUAUUCCUUCCACCAUUAUCCCACACCCUUAAUAUCC | |
| | AUUCCCAUGUUCUUCAGAUUUCUGUUUAUAUAAAUGAGAAAACUCAAGCA | |
| | GUUCUUUUCCAGUGUAGCGCACCUCCUCAUGGGUCACACUCUCAACCUUA | |
| | CUUCUAGGGGCCCGCCGGGACUUUAGUCUAGUUAUAGGUCUAGAAGCAAA | |
| | CAGGCAGGUUGGGGGUGGCUCCUGAGGAGAAUCAGCAUUACCUUGCCUGG | |
| | CAACCACCUCAGGGGAGGCCAUCACUGUUGCCUCAGGCGGCACAGGGUUU | |
| | AUCUCUUCAGACAAAGGUAGAAAGGCUGAUGGCAGCAUGGGUCGGGGAGG | |
| | GGAUGUUGCCACUACUGGGGAUGGGGAAGCUGUUCCUUCUGGCAAAAAAG | |
| | AUUCAUCAGAGUUUACAAAUUCAGUAUCCCCAGCUUCAUCAGUGUCUUCC | |
| | CACAUGUUCCUGUUCCAAGUUGCAGGGUCCCAUUCUUUUCCAAUCAAUCU | |
| | CACUUUAAUAGACACCUGGUGAGGCUGUGCAUGCACCUUCUGUUGCAGGU | |
| | CACCCACUUUCAUGAUAAGAGUUUGUGCCUGUUUUUCCAUAAUUCCCGCU | |
| | CUUUCUCUAUAGGAAAUAAGACUUUCACUUAGGGCAAUCUUAACAGACUU | |
| | GAGGUUCAGUAUUUGCUUCUGAAGCCAGGAGACAGAAUCCAUGAGUUUAU | |
| | CAUUUUCUUUCAUCACUUUGUCCACUGAACUUAGGCGCAACCAAUCAGCU | |
| | UCAUUACGUUCCUUGGUUCUGCACAUAUGGUCAAAGGUAUUAUGUAUAGA | |
| | GUCACUAAACUCCUUGCCUCUCAUGAGUGGUGAAUUGGGAGUGUCAAAUG | |
| | CAUUUAUUUUGUAUAACUCUCUAAACAAUCCAUGCCAAGGACUAUCAGUG | |
| | UUCUCCAUACUAUUAGAAGUAGAAUCCUUAGCAUUUUUGAGUCUAAUCAU | |
| | AUUAAGCAGCCAACUCCAGAAACUCCCAAACUAAUGAAAGAACUCCAUUC | |
| | UUAAAAUACUGUUCCUCUAGAACCAUUCUUGGUACCAAAAUCUAUAUUUG | |
| | CCAGAGUUCUCUAGAGGGACAGAACUACUAGGAUACAAAGUCCCACAAUA | |
| | AGCUGUCUUUAAGCUUGAGAAGCAAGGAGAGUGAGUCUGAGUCUCAAAAC | |
| | UGAAGAACUUGGAGUCCAAUGUUUGAGGGCAGGAAGCAUCCAGCAUGGGA | |
| | GAAAGAUAUAGGCUGGGAGACUAGGCCAGUCUCUCCUUUUCACGUUUUUC | |
| | UGCCUGCCUUAUAUUUGCUGGCAGUUCAUUAGAUUGUGCCCACCAGAUUA | |
| | AGGGUGAAUCCUCUUUCCCGAGCCCACUGACUCAAAUGUUAAUCUCCUUU | |
| | GGCAACACCCUCACAGACAUGCCCAGGAUCAAUACUUUGCAUCCUUCAGU | |
| | UCAAUCAAGUUGACACUCAGUAUUAACCAUCACAGAGGGCCACUGUUCUC | |
| | CAGACUCCAGAAUGAUAGAUCCACUGGCAGCUUGUACCCUGCACCUGGAA | |
| | AAGCUACAGGCAUUCAAUGCCAGCCCUUGAGAGCAGCAUUGGGGGGUCGA | |
| | GCCCUGGAAGGCCACAGGGGCGGAGCUGCCCAAGGCCUUGGGAGCCCAGC | |
| | CCUUACAUCAGUGUGCCCUGGAUGUGGGACAUGGAGUCAAAAGAGAUUAU | |
| | UGUGGAGCUAUACAAUUUAAUGACCACCCUGCUGGGUUUUGGACUUGCAU | |
| | AGGGCCUGUAGCCCUGUUCUUUUGGCUGAUUUCUCUCUUUUGGAAUGGAA | |
| | GUAUUUACCCAAUGACUAUACCCCCAUUGUAUCUUGGAGGUAACUAACUU | |
| | GUUUUUUAUUUUACAGGCUCAUAGGCAGAAGGGACUAGCCUUGUCUCAGA | |
| | UGAGACUUUGGACUGUGGAGUUUUGAGUUAAUGCUGGAAUGAAUUAAGAC | |
| | UUUGGGAAACUGUUGGGAAGGCAUGAUUGUAUUUUGCAGUGUGAGAAGGA | |
| | CAUGAGAUUUGGGAGGGCCCAGGGGCAGAAUGAUGUGGUUUGAAUCUGUG | |
| | UCCUCACUCAAAUCUCAUGUUCAAUUGUAAUCCCCAAUGUUGGAAGUGGG | |
| | ACCUGGUGGGAGGUGAUUGGAUCAUGGGGGCACUUUCACAUGAAUGGCUU | |
| | AGCACCAUCCCCUCAGUGCUGUCCUCAUGAUAAUGAGUGAGUGAGUUAUU | |
| | GUGAGAUAUGGUUAUUUAGAAAUGUGUAGCACCUCUCCCCUCUCUCUCUU | |
| | CUUCCUGCUCCACCCAUGUAAGAUCUAACUGCCUCCUCUUUUCCUUCCAC | |
| | CAUGAUUGUAAGUUUCCUGAGACUUCCCUAGAAGCAGAAGCAGCUAUGCU | |
| | UCCUGUACAGCCUGCAGAACAAUGAGCGAAUUAAACCUCUUUUCUUUAUA | |
| | AAUUACCCAGUCUUGGGUAUUCCUUUAUAGCAAUACGAGAAUGGCCUAAU | |
| | ACAAAAAGGUAUACAGUUUGGGAGAGAGGAAAUAAAAUUAUCUUUGCAGA | |
| | UGACAUGACUGUCUUUACAAAAUAUCCUACAGACUGGCAGAAACAAACAA | |
| | ACAAACAAGAAACACCUCUCCUUGAAGGAAAUAAUAAUCAAUAUAACAAG | |
| | GUUUCAGUAUACAGAGUUAACAUACAAAAUCAGUUGCUUUCCUAUACACU | |
| | GGCAAUAGACAAUUGAAAUUUGAAAUUAUAAUAAUAAAAUGUCAUUUACA | |
| | GAAGUGAUACCCUCCUUCCCCCAACGAACCCACCAAUUCAACAACAACUC | |
| | ACAGACAAAUUCUCUUACUGAGAAAUCCAAAACUAGUUGAGAGCCUCCUG | |
| | CACCCAGACACAUCAAAUCCCACAGGAAAAUUCAGGACACCCUCAUGUCU | |
| | GAAUCCCUACCCACAGCUCAAUGCCACAUGAUUGAAAGGAAUCAUAGCUC | |
| | CCAGCUUCUCCCUGGAGAGUAAAAGAGUUGGACCAUGUGUAUGACACUCU | |
| | UCCAACUUCUUCCUCCCCAAAGGAUGGGCCUUUCUCUUUCCAGUCUUGGA | |
| | GCAGUAAUGGAACCCAGCAUAAUCUAGCCAUCCAGGGGCUGGUAAGAACA | |
| | AAGACAGAAGUUUGCACUGACAGUUACCAUAUCCUUUCCCUCAGCUCAAC | |
| | ACAGAGCAAGAAAAUGAAAAAUCCCUGCUUCCAACAUCUUCUUGGGAAGG | |
| | GAAGAGUUAGUCUGCUUGGCCAAUGCCCCAGUGUUUCUGGGAGCUUCCCA | |
| | AAGGACUUCCUCUGUCUGGCUUGUUUUGGGGUACUUAUGGGACCUGGCAU | |
| | ACUCUAGCUGCCUUGGGGCCAAUGAGAACAAAUAUGGUGGUUUGAUCUAG | |
| | CAUGCAACUAGAUGAUGCAGUCCCACCCACAAGCUCAGUGUAGGGUGAAC | |
| | AGGUGAAAAACCACAGAUCCCAGCUUCUCUCUCUGUGUGUCAUGGGAAGA | |
| | GUUGGAAAGGGCAUCAAAUGAUUCAACUUUUCUGGGGGCUACUUGAGGAA | |
| | UGGCCCCAAUAUCACUUCUAUUGGAACACUGAUUGUACCUAGCAUACUCU | |
| | AGAUGGUAGCUGCUAAGAACAAAGAAAACAGAUUGGCAGGUUGGAGAGGC | |
| | CCCGAGAAUCCAUGGCUGAGCUGGUUAGUGAGGGUCUUCUCCUUUAUAAG | |
| | UUUAGUCUGUGAAGAUUGGGAGAGGUCACUGUUUUGUCUAAUAUACCAAC | |
| | CCUACACAAAGAGUCAAGGAAAAUAAAAAUAACAUGGAAAUGGAUUCCAA | |
| | ACAAAGGAACAAGAUAAAUCUCCAGAAACAAAGCCUAAUGAAAGAGAAAU | |
| | AUUUGAUUUACCUAACAGAGAACUCAAAAUAACCAUUAUGAAGAUGUUCA | |
| | CCAAAACCAAGAGAACAAUGCAUGAACAUGAGUAUUUCAACAGAGAUAUA | |
| | GAAAGUAUAAAAAGUACCAAAAAGAAUUUGUAGAGCUAAAUAAUACAAUA | |
| | ACAGCUCAAAAAUUCACUAAAGCAGUGUGACAGCAGACUAAAUCAAGCAG | |
| | AAGAAAAGAUAAGCACACUUGAAGACAAGUUAUUGUUGUUAGAAAUUAUU | |
| | CAGUCAGAAGAGCAAAAAGAAAAACGAAUGACAAAAAUAAAGACAGCUUA | |
| | AAGGACUUAUGGGACACCAUCAAGUGGACCAAUGUGCACAUUAUAGGAGU | |
| | UCUUGGAGGAGAGAGGAGAGAGAGAAAGAACCACAAAACAUAUUCAAAGA | |
| | AAUAAUAGCACAAAACUUCCCAAAUCUGGGGAAGAAAAUGCACAUUCUAC | |
| | UCUAGGAAGCCCAGCAGAUACCAGAUGAAAUGAACGGAAAGAAACCUACA | |
| | CUGAGAUACAUUAUAAUUAUAUUGUCAAAAGUCAAGGCAAAGGGAGAAUU | |
| | UUCAAAGUAGCAACAGAAAAGUGAUUUGUCAUGUACAAGGGAUUUCCCAU | |
| | AAAACUAAAAGUGGAUUUUUCAGUAGAAAACCUUGCAGGCCAGAAGGGAG | |
| | UGGGAUGAUAUAUUCAAAGUGCUGAAAUUAAAAAAAAAAAACCUGCCAAU | |
| | GAAAAAUACUUGGCAUGCCAAAAUUCUCCUUCAAAAAUAGAGACUUUCCC | |
| | AGACAAAUAAAAGCAGAGAGGCUGGGCGCUGUGGCUCAUGCCUGUAAUCC | |
| | CAGCAUUUUGGGAGGCCACGGCGGGCGGAUCACUUGAGGUCAGGAGUUAA | |
| | AGACCAGCCUGGCCAAUAUAGUGAAACCCCAUCUCUACUAAAGAUACAAA | |
| | AAAUUAGCUGGGCAUGGUGGCAGGCGCCUAUAAUCCCAGCUACUUGGGAG | |
| | GCUGAGGCAGAGAUUGCAUUGAGCCGAGAUCAUCGUGCCAUUGCAUUCCA | |
| | GCCCUGGCAACAGGGCGAGAAUCCGUCUAAAAAAAAAAAAAGUGGAGAGU | |
| | UGAUCAGCGCCAUACUUGUCUUAAAAGGAAUGCUAAUGGAAGCUCUUCAA | |
| | GUUGCAACAAAUGACACAAACGGUAACAUGAUAGCACAAGAAAGUGAAAC | |
| | UUGGUAAUGAUAAAUAUAUAGGCAAAUUCAGACUACUGCAAACACUGUAA | |
| | CUGUUGGAUGAAUCACUUUUAAUUAUAAAGUUAAAAGACAAAAGAUAUUG | |
| | AAAAUAUCUGUAAUUAAAUAUUAUUUAAAGGGAUAUGGAAUAUAGAGAGA | |
| | UGUGAAUUUUAACAUCUAUAACAUAGUGUGUGAUGGGAAAGAAGUGCAAG | |
| | UGUAGAGAAAUUGAAUGUAAGUUGUUAUCAGUUUAAUAUAGACUAUUUUA | |
| | AAUAAAUUAUAAGAUAGACUAAUAGAUAUUUUAUGUAAGCCCCAUAGUGG | |
| | CCACAAAGAAAUACCUAUAGAAGAUACAAAAAAGGAAAAGAGAAAGAAAU | |
| | CAAAGUAUAUCAGUACAAAAUAUUCACUGCAACACAAAGGAAGACAGCAU | |
| | GAGAGAGUAAGACAUAGGAGGUCAAGGUAGGAGGAUUACUUGAGCCCAGG | |
| | AGCUUGAGAUCAGCCUAGACAACAUAGCAAGACCCUAUCUGUAAAACAAU | |
| | AUAUUUUUAAAAUUAGUUGAGCAUGGUGGCAUAUACCUGUAGCCCUAGCU | |
| | GCUCAGGAGGCUAAUGCAGGAGGAUUGCUUAAGCCUAGAUAACAAAGAGC | |
| | UAUGAUUGUGCCAGUGCACUCCAGUCUGGGUGAUCCUGUCUCAAUAAAAA | |
| | AUAAAAGACAGAGAAAGAAUAAAAAGACAGCUGUCAGAACCACAAGACAA | |
| | ACAGACAACAAUGAACAAAAUGGCAAUAGUAAAUUUUUCUCUAUCAAUGC | |
| | UUACUUUACAUAGACAUGGAUUAAAUUCCUCAACCAAAAGACAAAGAGCA | |
| | GUUGAAUGAAUUAGAAAAAUCAGAGUAAACUAUGUGCUGUCUAUAAGAAA | |
| | CUCACUUUAGAUUUAAAGACACAGAUAGUGAAGGGAUGGAAAUAUAUAUU | |
| | CUAUGUAAAUGGUCACCAAAGGAGAAGUGGCUAUACUUAUAUCAGACAAA | |
| | AUAUAUGUAAAGUAAAAAUUAGCACAAGAUACAAGGAAGAACAUUAUAUA | |
| | AUAAUGAAAAGGUCAAUUGAACAGGAAGAUAUAACACUUAUAUGUACCCA | |
| | ACAUCAGAGCAUCUAAAUAUAUAAAGCAAAAAUCGACACACCUAAAGAAA | |
| | UAAUACACAAAAAAUACAAUAAUUAUAGGAGGCUUCUUUACCCCAUUUUU | |
| | AAUAGUGGAUAAAACAACCAGACAUAAAAUAACAAACAGCAGACUUGAAC | |
| | AGCACUAUAGACCAAAUGAGCCUAACAUACAUAUAUAAAAUAUUCAUCUC | |
| | AUAGCUGCAGAAUAUACAUUCUUCUCAGGUGUACAUGAAACAUUCUCUAG | |
| | GAUACAUCACAUGUCAGGUCACAAAACAAUUCUUAGUAAAAUUAAUAGGA | |
| | UUGAAAUUAUACCAAAUAUCUUUUUGGAGCACAAUGGAAUGAAACUAGAA | |
| | AUCAGUAGCAGAAGGAAAACUGGAAAAUUCACAAAUAUGUGGAAAUUAAC | |
| | ACACUCCCGAUAUCCUAGUAUUCUUCGCUUAAUGGGUCAAAGAAAAGAAU | |
| | AAGGAAAGAAAUUAGAAAAUAUUGAGGCAAAUUAAAAUAAAAAUACAACA | |
| | UACCAAAACUUAUGGGAUGCAGAAAAAAAAAAAAAGAAUGUGAUAUGCUG | |
| | GUAUAGGACAUUUACCAUGAAUGGAAUUAACAGGAUUGAUUAUAGCUCUG | |
| | GGUGAGUCAGUGAGUGAAUGUGAAGGCCUAGGAUGUUACUAUACACUACU | |
| | AUAGAUUCUAUAAGCACUGUACACUUAGGCUACACUAAAUUUACAAACAA | |
| | AUAUUUUUCUUCAAUAAAAAAUUAAUCUGAGCUUACUGUAACAUUUCGUU | |
| | UUAUAAAAUUCUUAAUUAAAAAAACUUCUUAACUUUUUAUGAUAAUACUU | |
| | AGUUUAAAACACAAACACAGCCGGGUGUGGUGGCUCAUGCCUGUAAUCCC | |
| | AACACUUUGGCAAGCUGAGGUGGGUGGAUCACCUGAGGUCGAGAGUUCGA | |
| | GACCAGCCCGACCAAUAUGGAGAAACCCCAUCUCUAAUAAAAGUACAAAA | |
| | UUAGCCAUGGUGGCAUAUGCCUGUAAUCCCAGCUACUCAGGAGGCUGAGG | |
| | CAGGAGAAUCACUUGAACCUGGGAGGCGGAGGUUGCGGUGAGCCGAGAUC | |
| | ACGCUGUUAUACUCCAGCCUGGGCAACAAAAGCGAAAUUCUGUCUCAAAA | |
| | AAAACAAAACAACAACAACAACAACAACAACAAAAACACGUUGUAUAGCU | |
| | GCAUAAAGAUAUUUGUUAUAUCCUUAUUCUAUAAGCUUUUUUCUUUUUUU | |
| | UUCUUUUUUACGUUUUAAAGUUUUUUGUUAAAAACGAAGACACAAGCACA | |
| | CACAAUAGCCUAGGUCCUUGCAGGAUCAGGAUCAUCAACAUCUGUGUCUU | |
| | CCACCUCCACAUCUUGCCCCACUGGAGGGUCUUCAGGAGCAGUAACACAC | |
| | AUGGAGUUGCCAUCUCCUAGGAUAACAAUGCCUUCUUCUGGAAUACCUCC | |
| | UGAAGGACCUGUCUGAGGCUGUCUUACAGUUAACUUUUUUUUAAUAUACA | |
| | UAAGGGUAUAUUAUAAAAUAAUGAUAAAAAGUCAGCACAGUAGGUUUGUU | |
| | UACACCAGCAUCACCACCACAAGCACGUGAGUAAUGCUACGACAUUAUUA | |
| | UAUCACUAGGCAACAACAAUUUUUCAGCAUCAUUAUAGUCUUAUGGGACC | |
| | ACCAUCAUACAUGUGGUCCAUCUUUGACCCAAAUAUUAUUAUGCUAUACA | |
| | UGACUGUAUUGGAAAUAACAAGGAAAGAAAUAGGAGAACCUCAGUUCCCA | |
| | AGGUGGAGAUCAGUUGUUGUUAAAUAUUAGAGUGCGUCAGAAUCACCUGA | |
| | AGGACUUAUUGAAACACAGAUUGCUGGACCCUUAGAGUUGAGUGUCUAGG | |
| | GUAGGACCUAACAUUUUGUGUGUCUAACAAGUCUCCAGGUGAUAGUUAUG | |
| | GUAUUGGCCUAGGGACCACAUUUUGGGAACUAUCGGCCUAGAUUUUCUCC | |
| | AAAAGUAGGAGGUUAGGUCAACUGCUGAGAAUAAGGGAAAGUGGGCCCUU | |
| | GAACUCUCCUUUCAGCCAAAGGCAGGCAUGUUCUAAACACUGAAUCAUGU | |
| | UAAAAGUGAAUUUUAAUCUGGGGGCAAUUCUAUGCCAAGCCAACUGAUUA | |
| | GUGGUGGGAUUAAUUCCUAGGUUUUAGAUAACAGCACUGCUUUGCAAAUG | |
| | CUCACAGCUUAAUGAUACCAUAGAAUUAUUAUCAGCCUCAUUUUCACUUG | |
| | UGUAGGAAGAGGCACGGAAAUAAAGAAGGCAGGAGUCUUCUUUCAGGUUU | |
| | CCUUAUGGUGGACUCUUUCAUAAGAAACAGUUCUGGCUUCUCCUUUGUUG | |
| | UUCCCUCAAAGAAGAUUAUAAAUAUGGUUGCUUGUCUCCCACCUCCAUCU | |
| | GCCUGAGGGCUGUGCUUUGCUUCUGUAAAUGUUUCAGUUGGAACAUGUUG | |
| | AUUCUGUUUGAGCAUCUAUUAACUUAGGUGUGAUGUCUAAUGUUCACUGU | |
| | CUCAACGUUCACCUCCACUGGGGAGAGUGGUGGCGAUUUCCCUGCCUCUG | |
| | UCUAAGGCUGGAAACAUUCGUUAUUGUGGAGGGGAAAGUGGUUGGUUCAC | |
| | UGAGGUGGGGGCUCUGAAACACAGGAUGUGCUUUAUUGCUCCCACAGUCA | |
| | GUCACAAGUUGACAGUCGCAUGAGGCUUUCAAUAAAAAUAUUUUAUACUU | |
| | UUGUGCUGCCUCUCAGCUGCAGAUCCUAAAGCCCUGUUUUAAAGAUCAAA | |
| | AUACCCAUAGAUGUGCAAAUGCCAGGGAUUCAACAAAAGCUGGUGCAUGG | |
| | AUGGGAAACUGAUGACACACACAUCUGUUCAGCUCUCAUCAGGCUUCACC | |
| | ACCCACUGGAAUCUUUUGGCUACAGAAACUGAAUUUGUGAUUCGUGCUUC | |
| | AAGUACUGCAGUCAACAACUCAGCAAUUCACAAAGUCUCUUCUGUGAUUG | |
| | CCGUCUUAGGUAUGUGAGGUAAUGGACAAUGGAUAUUUAAAAUUGUGCCU | |
| | CAACCCUGCUUUACCUCAUCACUUAUUCCGGUAUCAGCCAAAUUUAUAUU | |
| | AGAAUAUGGGAAGUGCAGGUUUUAUAUAAAAGGUGCCUAGGAUAGAUUCU | |
| | GGCCUAUAUAGCUCUAAUAAUUGGUAUAAUACUUUACAAUAUAGAUGAUA | |
| | UUCUCACUGUAACACAUUAUAGUAUACAACGUCCAUUCUGUCCCCUACUU | |
| | UAUUUAAACUCAACUCCAUAAGAACCUUGUGAGAUGGGCAUUAUUCCUUA | |
| | AGGUAAAAGAAGAACAAACAAAAAAUGGCUGCAACCAAAAUGUAAUAAUU | |
| | GGUGUGAAUAGUUUUAUAAUAAAAAAGAAAGACUUCACUUUGGAUAUUUG | |
| | AUGGCUGACACCUUUCAGUUUCCCACCUAUCUUCCUUUUUCUCCUUAGCC | |
| | CCACAUCCUGAGAAGAUAAGAGAACCUGGGCUCUCCUCCACUGGUGCCCA | |
| | UGGGGAAGUUCAAACCACACAAAUCCCUGUCCUCUAGGAAUUCUCAUUCU | |
| | AGUCCCAACCCUCUUAACUAUGAUAAAAACUCUAAACCAUCAACACCACC | |
| | CCCAUCUUGACUUGUGUCACCUUAGGUAGAAUCUGAGCCCUUCACCUUGG | |
| | GGAAUAUGUGAGUAGUAAACUUUAUUUUAUAUCUGUAAUUCCUAUGUUUU | |
| | AUUCAUCCUAGCAUUCAUAAAUUUCUGAGGAUGCUGGAUGUUCAUAUAAA | |
| | UAGGUUUAUUAGCUUUAGAUAGACUAAUGAUGCUUUAUUCAAAUGUGUGG | |
| | UUAUUUCAGAUCAAAGAAAAGGAAGCAUUGUGCUUGACACAGGGCUAAGA | |
| | ACUGAAAAAUGAACAAAAUAUGGCCUGUGCCCUUUCCUUAGUAGUUAUGG | |
| | UCUGGUAGAAAAGGCAGACAUGUACAUUAAAAAAUUAUAAAACAGUGUCA | |
| | UAUGUAGCAUGUACAAGUUAUUGUGGGAAUGCAGAAGAGAGAGUGGCUGG | |
| | UUUUUCCUUGGUUUAGCAAUAUGUGUGUAAAGUCAUAAGAGCAUGAAAGA | |
| | AGAUUGUAUGUUGAGGAAACUAUUUUUAGUUUUAUUUGGUUGGAGAGCUG | |
| | UAUUAGUGUGGAGAGAUGCAAUUUGAAAGGGCCUUAAAGGCUCUGCUGGU | |
| | ACAUUGGAUUUUAUCCUGAGGGCAUUGGUGAGUUUUGAAGGGCUUUAAGA | |
| | AAUGAAAUAAAAGAAGAACACUUUUGAAGAGUUCACUUUGAUAGCAGUAU | |
| | GGAAGAUAGAUGGGAGCCGAGACAGAAAGAUACUUGAGAACAAUACUACU | |
| | UUAGUCCAAGUGAGCAAUGACAAUGGCUAAAUCAGGACAAAAGCAGUGAG | |
| | AAUGGUUAGAGGAGGACAUGUGCCAGACACUGUUCCAGGUGUUGGGAUAU | |
| | AAGGUUGAAAGAGGACAGAGAAAUUCUGUUUUUUAUGAUGUUUUUAUUCU | |
| | AAUAAGGGUAUAGAAGAGAACCAUUAAGAUCCAUUCUCUUCUCUCCAGCA | |
| | GUAAGAAAACUCCACAGAUGCAGCUGAACACAUGACUACCCAGAAAAUAG | |
| | ACUACUUUUCAGCCUUUGUUGCAGCUUCCUCCAAGUCUAGCUAUACUAGG | |
| | UUCUGGCCAAAUCAUGCCCUUGAAAUGAAGAGGCAUCCUCCUCCUUUCCC | |
| | UUUUCCCUUUCUACUGGUUGGAAUGGGUACACAGUGAUGAGAUUUCUUGC | |
| | ACCAUGUAGCCAAGGUUACCACAGGCCUGAUAGAACAGCAAGACAAAAGG | |
| | GCUCUGAAUAUGUAGCAACUUCAUGGACAGCUGUCAUACCAGGCUGAACU | |
| | UUAAUGUGAAAUAACUAAAAUUCUGUCUUGUUGUUUCUGGGUGUCUCUUC | |
| | AUCACAGAAGCUGAGCCUACCUCAUAAGUAAUACUGGGGGAGAUAUACAG | |
| | UCAUAAUGGAGAUUUACAUGAAGAGAAUGCUCAGGUCUUGAACCCCACAA | |
| | AGGCAGUCAUCUAAGUGUAUAAAUAAGUUAUAUAAGUAUAAGCUGAAGCU | |
| | GAGUCUCUUAAGCUUAAUAUAUAAUUAUUCAAAAUAAGUACUAGUUGUAA | |
| | UUUAUAUGCAAGGAAAAGCUUUGUAGACUGUCUGAGCUAGUCAGUGAGGG | |
| | CUCCUCAGACAAGAAAGAUCCACUUACGCAAGGCACUUACACGUGGGAGU | |
| | GCCAGCCAGUGUGAUGAAAGAGAGACUAGAGCUGAAUAUCUCAUCCUAUG | |
| | UCUCAUUAUUUGAGGAACUUACUAAUCCUGUAUUAAGAAUUUGGUUAAUU | |
| | AUUUGAUAAAGGCAUGAGUUUGUUCAUUGAGCUGCAAGCUGAUUACAGUA | |
| | GUAAUUACAAUAACUAACAAGAAAACUAUAGAAUGAGAUAAAUAUAAUAA | |
| | AUGAAAUAAACAAGGUGAUGUGAUAGAGUAAAUAUAAGCUGAGCAAAAGA | |
| | AUGCUGCUUUAGACAAGUUUGCUACGGAAGUCCUCCAAGAGAGGUGAUGU | |
| | UUGAUUGAUACACAAAUAAUAAAUGGCAGUUAUUGUAUAAAAAGUAGGGG | |
| | GCAGGGUAGGAACUUUAUAGGCAGAGGGACUACAAAUACAAAAGCUCUGA | |
| | GGUGAGAAAGAGCCUGGUAUAUCUUCAUAGGAGAAAAAAGGCCGGGGUGA | |
| | AUGGAGAAUGGAAAGCGCGUGGGGAGAAAGAAGGAAGUUGAAAUUGUAGA | |
| | GGGAGGGAGCAAUUAGAUCAUCGAACUGCUUGUAGGCUAUAUUAAGGAAU | |
| | UUUGUUUUAUUCUAACAGCAAGGGGAAGCCAUUGUACAGUUUUAAACAAA | |
| | AACAUGACAUUAUUUGACUUUAAAAAAAUAAUGUUUUGGUUAUGUAUAGA | |
| | AUGAACCAUAGAAGCAAAGUGGAAGCAGAGAUUAUUGCAGGAAGGUAAUU | |
| | UGAAACAGGGUGAUGCCAGAGGGAAUGGGAACAAGUGAAAGGAUUUAAUU | |
| | GCUUUUUAGAAACAUUGAUAGGGCUUACUAUGAGAUGCAGGUAGAGGUCU | |
| | GAGAAAAGAAGUCUUCAAGAAUCAAUCAUGCUUUUUGCUUGAUUUGCUAG | |
| | GUUGAUAGUGGUACCAUUUGCUAAAGCUGAAAACACUCAGGGAAAUAUUU | |
| | UUUGGGGUAUAAACCAAAAGAUCAAUUUUGGACAAGUAUAAAAGUGUUGA | |
| | UGGCUAUAGGAAAUUAGGUGUAUGAAUCUGGGUUUCAGACGAGAGAGUGA | |
| | AAUUUCAGAUGAGAGAGAGAAUAAAUAUAGUAUUAAUACUUUAAUAGCUC | |
| | AUUUUAUUUAUAAAAUAUUUCAAAUAUACUAAAAGUACAGAAAAUAAUUU | |
| | CAUAGGCAUAAUCUCUUGAUGUACCCACCAUAUAGAUUUAACAAAUGUUG | |
| | AUAUUUUGCUUUUUUUUGCUUCAGAACUUUAAAAAAUAUAAUGUUGCAGA | |
| | UAAAGUUAAAGGAUGAGAGCAUUCUUAAGGAUGAUGGGAAGACAGAGGUU | |
| | UGAAUGUUAUCUUACUUCUUGUUCACUCCCAAUGCUACCUCUUCUGCCAG | |
| | CAGACAGGUCCUAGAGGAUAGGAAUGAAGCCUCAGGUUCUGUCACAGUCU | |
| | UGCCAAGGAGUGCAGAGGAAUUUCUCUUCUUUGGGAAGAGGAGAGCUUGG | |
| | GCAUCAGCACUGAAGAGCCCCAAGAUUAGGAUCAGAAUGCCUGGAUCCUG | |
| | GGACAGCUUCGCUCUCAGAAACUCAUAAUCUCCCACAAAUUCACAUCUAA | |
| | AGAAAUAUACCAAAAUUCUUAUUUCCGGAUUCCUAAAAACUGAGAAGUGA | |
| | CCAAACAGGCAGCUGGACCUUUUCUAUCUCUUGGGUUGGGAGAGCAUGAC | |
| | GAGGCCAGAGCAAGAAGAUCAGAAAGGUUUCCUUCUGAUGCCUUGACGUG | |
| | GCACCAGCAAGGUGUCCUUUACCAGAGGAAAAACCAGAAAGGAGAAAACC | |
| | UUUAAGAUAUACCUCAUGAAAUAGAGUUACUGGGGGAGGCAGACAGUGAC | |
| | CCAUGACAAAAAACAAAGUCCUUGGGAGAUUCAAAUACAAAACAGAAAAA | |
| | AACUUUCUGGAACCAAAAUAAUUUUAAGAAUUUGACACAAAAAUAUGUAU | |
| | ACAUUGUGAAAUAGGUAAAUGACAACAUGUGCAUUACCUCAUAUACUUAU | |
| | UUUUUUGUGAUGAAACACUUAAAAUCUAUUCUCUUAGCAGUUUGCAAAAA | |
| | UAUAGUAUGUUGGUGUUAACUGUUGUCAUCAUGCACAAUAGAUCUCUUGA | |
| | ACUUAUUCCUCCUAGGUGAAGUUUUGUAUUCUUUGACCGACAUUGCCUCA | |
| | AUCCACAAUCUCUCCAUUUUCUCUGGCAUCAGCCUUUUCAAAUCACCUUC | |
| | CUGCGAUAGUCUCUGCUUCCACUUUGUCCCUACAAUUCAUUCUACCCAUA | |
| | CCCAAAACACUAUUUUUCAAAGUCAAAUUACAUCAUAUUUUUGUCCAAAG | |
| | CUGUGUAAUGGCUUCUUAUUGCUGUUAAGAUAAAACAAAAUUCCGUUCCA | |
| | UAGCCUAUUAGCAAUUAGGUGGUCUAACUACUCCCUGCCUCUACCAUCUC | |
| | AACUUCCUUCUUUCUCUUCCCUUGCUUUUCAUUCUCCAGACACACCGACC | |
| | UCUUCAGUCCCUGCUAAGCAUAAUUCUACUCUCCACUUCUGAGUUCAAUU | |
| | UUUUUACACUCCAUAUAUAAGUGAGAUCAUGUGGCAUUUGUCUUUCUAUG | |
| | CCUGGCUUAUUUCACGUAACAUAAUGUCCUCCAUGUCCAUCCAUGUUGUC | |
| | ACAAAUGACAGAAAUUCCUUCUUUUUUUUUUAAAGAAUAAAGAAUAUUUC | |
| | UUUUCAUAUAUAUGCCACAUUUUCUUUCUCUGUUCAUCCAUUGAUAGACA | |
| | CUUAGGUUGAUUCCUUAUCUUGGCUAUUGUGAACAGUGCUGCUAUUAACA | |
| | UGGUAGUGCAGAUAUUCAACAUAGUUAUUUCAUUUCCUUUAGAUGUAUAC | |
| | CCAGUAGUGAGAUUUCUGGGUCAUAUGGUAGCUCUAUUUUUAAGUUUUUG | |
| | AGAAAACUUUCUACUGUUUUCCACAAUGGCUGAACUAAUUUACAUUUUCA | |
| | UCUACACUGUAAAAGGGUUUCUUUUUCUCCACAUCCUCUUCAACACUUAU | |
| | CUUUCACUUAUUUGAUAAUAGCCAUUCUAACAGGUGUGAGGUAAUAUCUC | |
| | AUAGUGGUUUUAAUUUGCAUUUCUCUGAUGAUUAGUGAUGUUGAACGUUU | |
| | UUUCAUAUACCUAUUGGGCAUUUGUGUUUCUUCUUUUGAGAAAUGUCUAU | |
| | UCAGAUCUUUUGUCCAUGUUUAAAAUUAGUAUUGAGUUGUUUGAGUUCCU | |
| | UAUAUAUUUUGGCUAUUAAUCCCUUAUCAGCUGUGUGGCUUGCACAUAUU | |
| | UUCUCCCAUUUUGUAGGUUGUCUCUUUACUCUGUUGAUUGUUUGCUUGGC | |
| | UGUACAGAAGCUUUUCAGUUUGAUAUAAUCCCAAUUGUUUAUUUUUGUUU | |
| | UUGUUGCUCAUGCUUUCAGGUUUAUACCUAAAAAAAGUAUUACCCAGACC | |
| | AGUGUAAUGGAGCUUUUCCCCUAUGUUUUCUUCUGGUAGUUUUUCAUUUU | |
| | CAGAUCUUACAUUUAACUCUUAAAUCAAUUUUUAGUUGAUUUUUGUUUAU | |
| | GGUAUGAGAUGAGGGUCUAAUUUCAUUCUUUUGAAUGUGAAUAUCUAGUU | |
| | UUGCCAACAUCGUUUAUUAACGAAUAUUCUCAUUGUGUAUUCUUAGCUCC | |
| | UUUGUCAAAAAUCAAUUGACCAUUAAUGUGUGGAUUUAUUUCUGGGCUCU | |
| | CUGUUCUUUUGGUCUAUGUAUCUGUUUUUAUGACAGCACCAUGCUGUUUU | |
| | GAUUAUUAUUGCUUUGUGGUAUAUUUUGAAAUCAGGUAGUGUGGUGCCUU | |
| | CAGCUUUGUUAUUUUUGCUUAAGAUUGCUUUAGCUAUUCAGGGAAUUCUA | |
| | UGGUUCCAAACAAAUUUUAGAAUUGGUUAUUUUAUUUCUGUGAAAAAAUG | |
| | CCAUUGGAAUUUUGAUAGAAAUUACACUGAAUUUGUAGAUCACUUUGGAU | |
| | AGUAUGGACAUUUUAACAAUAUGAAUUCUUCAAAGCCAUGAACAUAGAUU | |
| | CCCUCUCCAUAUAUCCGAGUCUUCUUCAAUUUCAAUGUUUUACAGUUUUC | |
| | AAUGUGCAGGUCUUUCACCUCCUUGGUUAAAUUUAUUUCUAAGUAAUAUU | |
| | UUUGUAGGUAUUGUAAAUGGGAUUGUUUUCUUGAUUUCUUUUGUGGAUAA | |
| | UUUGUUGUUAGUAUAUAGAAAUGCUACUGAUUUAUAUGUUGAUUUUAUAU | |
| | ACUGAAACUUUACCGAAUUUUGUUUAAUAGUUCUAAUAAUUUUUUGUGGA | |
| | GUCUUUAGGGAUUUUUAUUUAUAAGAUCAUGUCAUUUUUACAUAGGAACA | |
| | AUUUAACAUCUUCUUUUCCAAUUUGGAUGUCUUUUAUUUCUUUCUCUUGC | |
| | CUAAUUGCUCUGGCUAGGAUGUCCAGCAGCAUGUUGAAUAGAAGUGGUGA | |
| | GAGUGGGCAUCAUUGUCGUGAUUCAUAUCUUAGAGGGAAAGCUUUUGACU | |
| | UUUCACCUUUGGAUAUGAUGUUAGCUAUGGGUUUGUCAUAUAUGGUCUUU | |
| | ACAGUGUGGGGUACAUUACUUCUAUACCUAAUUUGUUUAGUUGAUUUUAU | |
| | UAUGGAAGAUUUUUGAAUUUUGUCAGUUGCUUUUUCUGUAUCGAGAGGAU | |
| | CAUAUGGUUUUUGAUUUUUUUUUUAGAUUUGCAUAUGUUGAAUCAUCCUU | |
| | GCAUCCCUGGGAUAAAUCCAACUUGAUUAUGGUGAAUGGCCCUUUUAAUG | |
| | UACUGUUGAAUUCAGUUUGCUAGUAUUUUGUGAUGAUUUUUGCAUCUGUG | |
| | UUCAUCAGGGAUAUUGGCCUGUAAUUUUCUCUUCCUGUAGUGCCCUGUCU | |
| | GGCUUUGGUAUCAGUUUAAUGCUGGUCUGAAAAUAUUUAUGUAGCUCAAG | |
| | AGCAAGAUUAGAUAUAGAAAUGUGGACUUAUAAGUUUUGGGGCAGAUAAA | |
| | UUGAUAGUUGAAUGUUUUAUAGACAGGGAAAUGGAAUCCACAAAUGAGUU | |
| | UCUAGAAUGAGAAAAGGACAACAUUUGAAAGGAGGGGGAAUGCAAAGAGC | |
| | AAGUUAAGACAAUGGAGAUGACCAGCCCUGACCAUACAAGAACAAGAUCA | |
| | GAGACAGGAAAAAGAAGCAAUUAAGCAUACUGCAGGUAAGUCAUGUAAAA | |
| | UAAAGGCAGGAAGUGUAGCUUGGGUCUGGAGAUUUGGAGAGCAUUUAUGA | |
| | CUUCCCAUUUCCCCAUAGGCCCUAUGAAUCUAGUAGUCCUGGUUCUUACA | |
| | UGGGGAGCAUUCCUACCAGAGAACAUGAUAAAUAUACCACUCAAAGCUAU | |
| | AGCUGCUACCUGGUCACUUUGGGCUCCUUAUACCAGUAGAUGAAUAAGCA | |
| | AAGAAAGAAGUUAACAUAUUCUCUGGGAUAAUGUAUCCUGAUCAUCAAGG | |
| | AAAGUUAAGGCUGCUGCUAAAUCAUGGAAAUAGGCAGCACAUAUAUUGCA | |
| | AGGAGAGUAAAGUUGAGCAAAGGCACUCCUACUUCUGUGCCUUGACUCCC | |
| | UGCCCAUGUGUUCUCCUAUUUGGACUGUAGAACCACAUAAUGGCUAUUGG | |
| | UUUAAAGUGUAUUCCUCAUCCUAAAGUAUAGGGUUCCAUGCUAUAGAGUG | |
| | UCAUUUUCCCACUAGCACCUCAGUGGCAAAUUUGAGUCCAUUACAUAUUU | |
| | UUCUAUUGCUGGCAGCUUCUGGAUGGUGUGGUGGUCAUAGGAUUAGUGCA | |
| | CUCCCUGGCUAUUUCCUCUACAUCACACAUCCUUUGCUGUAAAGUGAUCU | |
| | CUUGGCCUGAGUAAAUAUUUUGUAGAUUCCAAUUUGGUUGUCAUAUGCUU | |
| | UGAGUUUUUGGAUAGUGAACUGGCUGAGACACUGUAGGCAGGAAAGGCAA | |
| | ACCCAGACCAAGAAUACACGUUAAUUCCGGCUACAGUAAACAUAACCUUU | |
| | CCCUGGGUGAAAGGGUCCUUAUGGAAUCAACUUGCCACCGAAUGGCAGGU | |
| | UGGUCUCCUUGAGAGAUGGUCUCAACUUUGCUUUCUGUUGCAAGGAGGUC | |
| | CAACAUUCAUCAACAGCAGUUACUAAAUCAGCUUUGAAGAGAUGGAGCCU | |
| | AUGCCGUUAGGUCCAUUCAUAGACUCUGUCUCUAUCACUGUGGCUACACU | |
| | GUAUGUAAGACCACUUUCUAGGCAUUAAGGUGGUCAAGUAUAGAGAUUUG | |
| | CUGACAUAUCUGGCCCAGUCAUCCUUGGGGUUCUGUAGGAUUCUUCUGCA | |
| | GUGGAUUCUGUCUGGUAGGCACAAAUGUACAAUAGAACAAUCCCUGCACU | |
| | UUGUGCCCACUCUCAUAGGUUCAUCCAUAUGCCUCUUACCCAGACCUUUU | |
| | CAUACCUGGUCUUCCAAUCUUGUUUAUUUCAAGGCUGUAACCAGUCAGCU | |
| | AGGUAAGUCAUUAGUCCUUAUAUCCCAGUUUUAUGCCACUUUUCUUCUUU | |
| | CCCUAACUACUGUUUUUCAGUGCUACUCUGUGGUACAACAGCAAUUCAUU | |
| | UUCAUCUUACACCCACACACUGAGUUGAUCCAUCCAUGUACUAAUCUUGG | |
| | GCUUUUUCUCCCUCAUCAACAGGUCACAGGAAACCCUUCAUGAAUUCAUA | |
| | GGUGUGAAAUAGGGGAGAAGCAUUAUAACAGUGACAGAAAGCAUGCGGGU | |
| | UUGUGACAUAUGUUUGUGUAUCUUUCUUAUACCUUCUUACACCUGCUCAA | |
| | GUUUGACCCUGGGCACAUCCUAUCCAUGUUAUGGUUGAUUGCUGCUGGGG | |
| | UCACCUGAUUUUAUGAUUUGUUGGAUCUAUUGGUAUCUGUGGUGUGCUAG | |
| | UAAAUGAUUACUUCUGAAAAAUACUGCCUUGGCUUGUAGCAUUUGGUGGC | |
| | UUCUAUGGCAUAAAUAUGUCUACUAUGGCUGAUUUCAAGUGCCAAACUGA | |
| | UGUCAGAAUGUGGAGUUAGGAAGAGAUGUGAUGGUAUGAACUGUCUCUAG | |
| | CACAUCACUAUCUUCAGCUGGUGAGAGCAGUUCUGGUCACGUGGUCACUU | |
| | GAUGUCAUUUGAGUUUCCAUGGUUUGUUACUCAUUUUCUACUGGGGCCCA | |
| | AUGGUAUGCCAGGAAUUGUUUAUCAAUAGUUCAUAGUCCUGUACUGUAGA | |
| | UGUCAUAGCCUUGCCCUGGAACCCUAGAAGUGUGCACUGUAUAAAACACA | |
| | UUUUGCUACUACAAUUAAUUCCAGUACUAUAGGUGAUGUGGUGCAAGCAA | |
| | GAGUCCUGGACCUUAUGCAGACCCAUUUGUUGCCUGGGGCUCCUCUCAAA | |
| | AGUUACACCUCUUUGCAUCGUUUGGCAAAUAGAUCAUAACAGUAGUCUCA | |
| | AGUGUAUUAUAUGUUGCACCUCAACAUCAAAGAGGUCUGCUGAACAUUGU | |
| | GAUUCUCUUUCAAAGCUAGGAGGCAAGAUAGUAAUUUGCCCUUUACUUUG | |
| | GAAUACAUAUCCCAGGAUGCUCAGAACACUCGGACCCUAAGAUGUUUACC | |
| | UAUGGGGCAGCCUCUUGAAUCUUCCUCUAGAACACACGUUUCUUUCCAAA | |
| | GCAUCCAGAAUACUUGCCACUUUUUGCACAUCAGGCACGGUUAACAUGAC | |
| | AUCCUCAAUAUAGUGGACCAGUGUGAUGUUCUGCAGAAUGUCCAGAUGAC | |
| | UCAAGGCUGUGCUGACAAUGUUAUGACAAAGAGCAGGAGAAUUAACACAG | |
| | CCCUGGGGCAAGACUGUGGAUAUACACUAUUAUCUGUUUAUGUGAAUGAG | |
| | AACUUCUUCCGAUCCUUCUUUCUGAUAAAAAUGAAAAAGAAAACAUUUGC | |
| | CAGUUCAGUGGCGACAUACUUUUGGUGUGCUUGGUGACUCUUGGUUAACA | |
| | GGUGGUCCACAGUUUUUGCAAGGCCAGGCUCGGCUCGUGUAUUAAAUAGG | |
| | ACCCCAUUAGGGACCACCAUUCCUGUCUCCUUGAAGACUUGGAGGGUGGC | |
| | ACUAAUUUUUGCCAUUUCCUUGAGAUGCUGUUAUGGGUUGAAUUAUAUCC | |
| | CCAAAGGAUAUAUUGAAGUCCUAUCCCCUGGUAUCUAUGAAUGUGACCUU | |
| | GUUUAGAAAUAGGGUGGAUGCAGAUAUUAUUAGUUAAGAUGAGGUCAUAC | |
| | UGGAAUAGGGUGGACCCUUUCCCAGUAUGACUGGUAUCUUUAUCAGAAAA | |
| | GGGAAAUUUAGACACAGCUAUAGACACAGAGGGAAGACAGUUAUGUAAAU | |
| | CUGGAGGCAGAGAUUGGAGUUAUGCUGCCACAAGUGAUGGAUUGCCUGGG | |
| | GGCUACCAGAAGAUGGAAGAGAUGAGGAAGAAUCCUCCUUCUAAGACUUU | |
| | GGAGGGAGCAUAGACCUGCUGACACCUUAUUUUUAGAUUUCUAGCCUCCA | |
| | GAACUGUGAAAUAAACUUCUGUUGUUUAAAGCCACUUAGUUUGUGUACUU | |
| | UGUUAUAGCAGCCAUAGGAAACUAAUACAGAUGCAAUAUAUAUACUAUAU | |
| | AUAAUAUAUAUGAAUACAUAUACAUAAAUAUAUAUACUAUAUAUAAUAUA | |
| | UGCAUACAUAUACAUAAAUAUAUAUAAUCAUAUAUAUUUAUAAAUUCAUU | |
| | AUCCUCGUGGAAGUGUCUUACUGGCAUAUCCAGGAUCAUUCUCUGGGCCU | |
| | UUGCUACAACAACAGCUAUAACUUUACAAUUCAAUGAACAAAGGGUUCUG | |
| | CCAACUGCUAAGUAUGCCCAUCCCAAUUGUACAUUUGGAAAUUGUGCAAA | |
| | GGCCCACCCGUACCCAUUGUGAGACAGACAUGGUUUGGACUCCGGUUGCU | |
| | AGUUGACUUCCAUAUACCUCUACUCUUAGCAGGAGGGUAAUGUAUUAGUC | |
| | AGGGUUCUCUAGAAUCAUAUAUAUAUUAUAUAUAUGAGAGCUUAUUAUGU | |
| | AUUAACUUACAUGAUCACAAGGUCCCACAAUAGGAUGCCUGCAAGCUUGA | |
| | GGAGCAAGGAUAGCCAGUCUGAGUCUCAAAACUGAAGAACUUGGAGUCUG | |
| | AUGUUCAAGGGCAGGAAGUAUCCAGCAUGGGAGAAAGAUAGAGGCUGAGA | |
| | GGCUAGACCAGUCUCUCCUUUUCACGUUUUUCUGUCUGUUUUAUAUUCAC | |
| | UGGCAGCUGAUUAGAUGGUGCCCAUCCAAUUAAGAUUGGGUCAGCCUUUC | |
| | CCAGCCCACUGACUCAAAUGUUAAUUCCUUUGGCAACACCCUCACAGACA | |
| | CACCCAGGGUCAAUACUUUGUAUCCUUCAAUCCGAUCAAGUUGGACUCAG | |
| | UAUUAACUAUCACAGGCAAUGAUGGUGUUUGGGAUCUUUGGCUAUCAGCA | |
| | UCAAUCUGUAUUCACGUGUUUGGAAAUAUCUGAGUAAUUUACGGAUUGAU | |
| | CGAUGGUGUUGCAACAUCUUUCUUGUUUUUCAGUUGAUGUGUUUUGGGUC | |
| | ACAGAACUGGCUCAGGCCUAAAAGCUGAGCAUGGAAAUAAGGCUUUUCAC | |
| | UGAGCAUAGCUGACCUCAAACUUCUACUCUGCCGUCACGUAUCUCUUUUG | |
| | AAUAUUCAUAUUCAAAUACCCUUAUUGGCUGCCUAUCUAUCUUGCCCCUA | |
| | GGGACAAAAUGUUCUAUGAGCCCUUUCCAUAAAUUCUGUGGGUCAUGCCU | |
| | UGCUGACUCAUUCUGAACUUGCUGUGGAUUAUAGCCUUCUGUCCACCGCU | |
| | CUUCUAUUGGGUACAUGCUGCCACCUAGCCUCUGCUCUUCUCAGAUCCUA | |
| | UCAUCUCCAUUGCUAUUAGGGAACCCACUACCAUAACAAUAUCUCACAUC | |
| | AUUAUUCCCAGGGGUCCUUCUGACCUUAUUGCCUUGGGCAUGUCUUAUGG | |
| | GCCUCCCUAAGGAAUAUGGUCGGUACAGGGUUUUCUGUCUCAUAGAACGG | |
| | ACCCAUUGCUUGCAUGUUGCUUCUGUGAGCCUUUUAAGCCCUUCCUCCAU | |
| | CAUUUGCUACAGCAAUUCUGGCAUCUCUAUUUUGUUUACUGUAGGCCUUU | |
| | CCUUUUCUCAGGCUUUCAAAGUUAAUUGUAUCAGCUGAUUACAGCAAUCA | |
| | CUGGGGCUCUUGCCAGGGCAUUAAAUCCUGUGUCACUGGAAAGUGCCACU | |
| | AUAUUGCAAAACACUCCCUAACACAGCUGUAUAGCCUAUCUUCUCUUGAU | |
| | UUAACCCCCUGAGGAACCACUUCCAGUUCCUGAUGGUAACAUGUUAUCCA | |
| | UGUCUUGAUGUUUUUAGGCAUAUAAUUUCUUUUCUGCUUUACCUGUCCCA | |
| | ACACUUUUGAUCAGGUUAUGCUGAGAUUUUACUCUAAUUAUGAACCAAGA | |
| | GAGGAAGUGGAGCAAGUCCUGAGAAGGUAAAGAAAUGUUAUCUAAGAUAC | |
| | CUGCCUCACUUGAUACCUUUGUAUAACUUCAAACGUGUGUGUGUGUGUGU | |
| | AGCUCUGUCUUCCAAUAAGAGAUAAUUGGUCACAUUUUCAGGUGCAUAGG | |
| | ACUCAGGAUAACCCAAGAUUUGAGAUUCUUAACUGUGUCGAUACAGAUAU | |
| | CCCCAUCCAAGCAUCAGGGCCCCACUCCCUUCAGGGCUCUAAGUUUGUGU | |
| | AAGAGACCUGCCUAGACUGAGAUCCAGCUUUCUCUGAUGCACUGCUAACA | |
| | AUUAAUUUUGUUUUCUCUUGUUCUUCAACCGUGGCUGCCAUCCAGGUGCA | |
| | GAAGUGGAAGUUUUAUUUAAAUAGUGCCUAGGAGUUCCUGUUACUCUCAC | |
| | UUUGCUAAUUUACUUUGUUGAUUAAUAGACUUGAACCUGUCAUUUUCUCU | |
| | CUUCAAUCACUGGUGCUGAGCAGUAGCCAACCAAUUCCACAUUCUUAUAG | |
| | UUGUUAUUUCUUCAUAUCUCUAAAACACCCAGAGUAUUGUCGCAGCUAUU | |
| | GCACCGCUUCCACCUGUAUCCCAUCACAGGACAGCAUAGGUGAAAGCCAG | |
| | UAAAAUGCACCAGCAUUCCAAGGACUAUCAACAUUCCACCUAUCACCAGC | |
| | AAUAGGGUUCUCAUUAUCAUCCAGCUGGAAAAUGAUCCAACUCCAGGAUC | |
| | CCCAUCUUUACAGUCUGUCUCUUAGAAGUGCUUCUUGUAUCAGUGGUCAU | |
| | AGAUUGGGUUCCAUUCAGGUUAGGGAUCCUUGUUUAAGUCACUUAUUGGG | |
| | GAUGUGCUCAAUAGGGGAGUGAGGGAAGCAGAAUAGGAUGGGGAAAACGC | |
| | CAAGCAAGAAUGUGGUCUCAGGAGGGACUAGCUUCAGUCUGAUCCUACAG | |
| | GACACUGGAGCACAAAUUACACAACAGAACUAGUCGUACAUAGAGAAAAA | |
| | GAGGCUGGCCUUGUGUAUCCCAUGCCAGGAGGUCAUUGGCUGAGUCAACC | |
| | CUGGAGAAGGGAGGGAAAGUGGUGUAUCCACCCAGGCAAAGUGGCUUCCA | |
| | UCUGGUUCAGGGCGAUUCUCUGGAAUAGGGGUGAGCUGUUUGUUGUUAUC | |
| | UCCAAAAGUCACAGCAAAUGGGAGAUGGUACAACCAGAAAAGGGAAUGUG | |
| | GGCAAACACCAGCCACAUUCACCACAAUAUUACAGAGCUAUUAGGAACUA | |
| | UAAUGAUCAGCAUGAAGUUUUUCUGUGUCCUAGGUAAGAAAUACAUUUCU | |
| | UUAAACCGUCUGGAAAUCUUCUAUAGUCUUGGAUAAGAAGGUUGUGUUUA | |
| | UCUUUCCUCCUUUUUAGUGGAAUUAUACUCAAUCCCAAAUGCCCAUUCAC | |
| | UAUGUUUAACAAGGGACCGUCACGCAAAUAGCAUCUCUCUUCCUGGUCUG | |
| | CUGUCAACUCUUCAAGUCUCCACAUCAAAAAUGUUAUUCCCUACUGAGUU | |
| | AACUUUACUUUUCUCUCUCCUUACCUUUGUUCUUGCAUAUAAUGGUUGCA | |
| | GUGAGGGAUUAUGAGAACAUCUCCUUUCAGAUACGUUGUCACAUUCAGAA | |
| | UUGUGUGAUCUAGCAUGAGAAAGGCUUAACCUUUUUCCUUUCCAUGUGCC | |
| | AGUGAAAAUUUCUUUAUACUAAUACACGUUAUUUCUGAAAAGGGGAUGAG | |
| | AGAAAGGGACAAGAGAAGGGAUGAUACAAAAGUAAUGUAGAAGUGGCCAA | |
| | GAAUAAGAUUUGGCUUUCCUAUUUUUUUAGUUUGAGUUUGGAAAUUUAUG | |
| | CAUUCUUUUUGUUUGUUUUUGAUCCAGUAAAAAAAGUGUCACCUCUCGUC | |
| | AGGACUUCAAUAGUUCUGAAGGGUCUGGAAGUAAGUCAUUGUCUCCUGAG | |
| | UUGAUUUAAGGCAGUUUAUGAUGAGAGUCAUUCUGUUUUUUAUUCCCUAA | |
| | AACUCUGAGCAUACUGCUGAGUGAAUAGUCUGUGCUCCACAACUACUUGA | |
| | AAAAUGGUGAUGCAGGCCAAAGUGUUUUGAAAACUGUAAAAAUCCAUGCG | |
| | GAAAUGAGGUAAUAUGAUUGCUUUAAAUUGACCUCUCCAAAGGCUCUUUC | |
| | ACCUUUUACCUGUUUUACCUGUUUUACCCCAUAUAUAGAUCCCAAUGUUC | |
| | UUCCUCCUACUUGAUGCAGAAUGCCUGUUUCAUUUUCUCCUUUUUAGCCA | |
| | UAAAAAUUCCAAGUAUAAUUCUAGGGCUUGGUUUGAAUCCCACUGUGAGG | |
| | AAACAAAUCCCGAUACUCUAAGGUUUGGCAAUGGAGGAUGAAUAUCCCUU | |
| | UAGGGAAAACGAUGGCUGAAACCUGUGGGUUUCACUCGUGUCUACUGAGA | |
| | UUCUCCUAAGGGACCUUCUUUUCUUAGGACAGUGUUUUCAAAGUGUAGUC | |
| | CGCACGUCAGAAUAUUAGCAUUACUAGAGAACUUGUUAAAAAUGAAAAUG | |
| | AUUAGCUCUACCCCAGACCUAUUAAAUUUUGAACCCUGAUUGUAGGACCC | |
| | UGCAGUUCAUGUUUCAGUAAGCCUUCCAGGUGAUUGUGAGGCCCGCUAAA | |
| | GUUUGAGAACCAUUGUCCUAGGGAAUCACUUACUGAUCACUUUUGAUACC | |
| | ACCCCAUUAGCUUCAGGAAGUCCUCCUCAACUUAGCACUUUACACCAAAU | |
| | UAACCCUUAAUUGUUGUGGCACAGUCAAAACAUUUAAACUAGCUUUCCUA | |
| | CCUAAUGCCUUCUCCAUCAUAAAAAGAAAGUGAAUUCCUAACAUUAAUGU | |
| | AUAAUUAGGCCAGGCGCGAUGGCUCAUGCCUGUAAUCCCAGCACUUUGGG | |
| | AGGCUGAGGUGGGUGGAUCACCUGAGGUCAGGAGUUUGAGAUCAGCGUGG | |
| | UCAACAUGCUGAAUCCCCAUCUCUACUGAAAAAAUACAAAAAUUAGCCAG | |
| | GCAUGGUGGUGUGUGCCUGUAAUCCCAGCUGCUCUGGUGGCUGAGGAGGG | |
| | AAAAUUGCUUGAACCCAGAGAUGGAGGUUUCAGUGAGCCAAGAUCAUGCC | |
| | AUUGCACUCCAACCUGGGUCACAAGAGCAAAACUUGGUCUCAAAAAAAUA | |
| | AAAAUAUAAAAAUAAAAAUAAACCCACCAGUUUUAUAGUCAGGCAAACUA | |
| | CACUUUGACUCCUGCUUUUCACUCAACCACGUUGAUAGGAAGGCUCUGCA | |
| | UCUGUUAAAUGAUGGUAAUAGUAAUAUCUACCUUUUAAGACUAUGGUGGA | |
| | AAUUAAGUGAGUUGGUGAAUGGAAAGCACUUAGCAAAACGUCUGACUCAU | |
| | AGGUGGUUUUCAGUAAAUGAUAACAAAUCAUAAUUUAGCUUAGUCAUCAU | |
| | CAUUUCAUAGCCCCCUAUCUGCAGUGGGUCUCAGAGACUAGCUCUCAGGC | |
| | CACCUCCACCGGGCAUGGAACAUUUUUUACCUUUGGAAUUUAGAGGCAAC | |
| | CCUAAGCAUGUCUUGGGCCCUUAGGGUGUAAGCCAAGAGAGAAGCAGGAA | |
| | UUCUCUUCUGUGUCUAACUUCCACUGUCCAAAUUCUAACUUCCACUGUCU | |
| | UAAGACCCUUCUGUCACCUAGGAUAUUGUUUUUGGGAAACAUCAGGCCCA | |
| | UUCCCAACAUUUACAGGGACUGAAGCAGGAGUACAAAUGGAAGGCCCACA | |
| | CAUCAUAUAUGUAUUUAUAAUUUACAGAGCAAGCUGAAAAUGUUUUAUAC | |
| | UCUGGGUAGGCAGGAUAUCAGCCCACACAAUCCCAGGAAGCUGUGACUAU | |
| | GUUACAUUAUGAGAUAAAGGGACUUUGCAGAUGUGAUUAAGUUCAGGGCU | |
| | UGAGAUGGGGUGGUGAUCCUAGAUAAUCUAGUCCGAUGAAAUCACAAGGG | |
| | UCUUUAUAAGAAGGAGGCAGGAGAGUCAGAGAAGGAGAUGUAACAAAGGA | |
| | AGCCAAAAUUGGAGUUGUGCAAAUCCAUGAGUGAGGUAGUGGGCAGUCUC | |
| | UAGAAGCUGUGAAAAAGCAAGAAAAGGGAUUCUUCCCUUGAUCCCCAGUG | |
| | GGAGUGCCUUGCUGGCCCAUUUUAGACUGCUGACCUUCAGAACUGCUCCU | |
| | UAAUAUAUUUGUGUUGUUUUAAGUCAUAAAGUUGCAGCAAUUAGUUACUA | |
| | CAGUGAUAAGAAACUAAUAAACCUCCUACCUUCAUAACAGUACAAUUUUU | |
| | AAAAAAUGUGUACAUAUGUUUUUAUAAGACUGAAAGUUGGCAAAAUAUCA | |
| | AUGGUGAUUGAAUUUGAUUAUUAUUUUGCAUAACAAAUGGUCUUUGAAUG | |
| | ACUCAAUAAUAUUUGGGUGAAUAAUAAAAUAAAGAAUAAAAUAAAGAUAC | |
| | AAUUUAUUAUUAUUAUUUUCUGUUUAAGAUGGAGUCUCGCUCUGUUGCCU | |
| | AGGCUGGAGUGUAGUGGCAUGAUCUUGGCUCACUGCAAUCUCCAUCUCCC | |
| | AGGUUCAAGUGAUUCUCUUGCCUCAGCCUCCCAGGUAGCUGGGAUUACAG | |
| | ACAUGCCACCACACCCAGCUUAUUUUUGUAUUUUUAGUAGAUACGGGGUU | |
| | UCAUCAUGUUGGCCAGGCUGGUCUCGAACUCCUGACCUCAAAUGAUCCAC | |
| | CUGCCUUGGCCUCCCAAAAAGCUAGGAUUACAGCUGUGAGCCACUGUGCC | |
| | UGGCCUCAUUAAUUAUUUUUAUCUCAUAACACUUAUUUUUCUUUCCUGUA | |
| | UUUCAGCACAAUCAUGAGUUAUAUGGUUCAGAGAACUUGUUUCUUAUACA | |
| | CAGUAUUGCCAAACUAGGCCACCAUACUUGAAUUACUGUAGUUCCUAGCU | |
| | AAUAUUUUUAAAUUAUUUUCAGUCUGGAGAAACUUGGUUCUACUGAGGCA | |
| | GUAGCAACCUAAUUGUCAUUAAAACUCUUAAAGAAUACUGGAUUAAGAAA | |
| | UAGAUUAUUAAGUUAUAUAUCACGUUCAUGCAUUAUAAGGGGAUUGUCUA | |
| | UGAUGCAUGAUCUCAUCAUGAUCUUAUCAUGAUCUCAGAAAAAAAUUACC | |
| | AAGUAUUUAACUUAAGCAAGUGAUUACUGUUAUGUAUAUUUUGCUUUUCA | |
| | ACACCUACAAAUCAAUAUCUAGAUGCCUAGAGUUUUACUUAAGUUUCUUU | |
| | UUUCCCCCAAUCUUUUCAAUGGUGAAAUAUUAGAAGAAAAUUUUAAAAAC | |
| | AGAAGUAUGAUGCUUAAUUUGAUCAGUUCUCUCACUACAUUUGAUACUAU | |
| | UUCUAAAUAAGAAUGACCAGUCUGCAGGUUCUCAUUUGUUUGUGCAUGAA | |
| | UUCCUUUGUGUUCAUAUAAAUAUUUUCUAUUUCCUUUUUCUAAUUUUUAA | |
| | AUAUUUUAUUGUUGCAUCUCACAUGUAGUUUAUUUCAAUUUAGAAAAAAG | |
| | UGUUCAAAAUAUUUGCAAAGACUUUGUAUUUUUUUUAAAAUGAAGUAGCC | |
| | AAACCUAGAUUGUUAGUGUUUUUAUAAACUUCUGCCAUAUAAUAAGUGGC | |
| | AAGCAACAAUUCAUACUGCAUCAAUUUGUGAUUCUCUUGAGAAUCGCAAA | |
| | CAAGAACACAGAGACAUAAGAAAACAGACGCUUGGCACUUGUGGAAAAUG | |
| | GUGUGUUAUUAUACAAGAAUCUUCUGCUUUAGUUCUGUCAGAGAGGGCAG | |
| | AAUUGAGUAAAUACUUUGUCUUUUCUUUUACCAAAAUCCUUCCCUGUACC | |
| | CUGGAGCCCUGUCCGUCCAUCCAUCUCAGAUGUUAGUUUCAGCACAGUCC | |
| | CGUAAACCUUCAGGCACUGACACAUAAAGACCUUUUGUUCUGAGGACUGG | |
| | GAAGAGAGAUGUAGAAAAGUGUUUCCCUAGGGCGUGGACAGUUUAUACUA | |
| | CAUCCACUAAAGUCAAGUGCAGUUCUGAGGGAACCCUUUUAUGGGAUUUU | |
| | GCAUUCUCUACCCAUAGAAAUGUGUCUUUCUCCUCUUAUUGGAAAAACAA | |
| | CAACAAAAGCAUAGAAAUAGUAAUAGAACUCACCGCAACAGCAUAAUGCA | |
| | CCAAGUGGCACAUGUGUGCACACUGACACUCACACAAGUGAAAAACUGAA | |
| | GCAAGUCGCCCAAAUUUGCAUGGGUAACAGAUUUGGGAUUCGAGCCCAUG | |
| | UCUACUUCACAUUGAGUUCAUUCUGGUACGUCAUCUUGCUUCCUCAAGAG | |
| | CAGGGUGUUAUCCUUUCUCUGGUUUAUCUAGCAGCUUACCUGUAUUUGUC | |
| | ACUCAAAACUGACUCACAUUUCACCUCCUGGGGAAGGUGCCCCAAUUCCC | |
| | UUUUGAACUUUCUACAGUAACAUGCUCUUCAGUCAUUUAUAGGGUUACGU | |
| | GCUGUUCUCACGCUGGCCUCUGAUUCUUUGAGGACAAGGACUGUGUUUUA | |
| | CUGCUUUCUGCAUUUCUGAGGCCUAAGAGAGCGCCUGGAAUAUAUUAGGA | |
| | GCUGAAAUAUGGGAUAAUAAGAAAGCUCUUAAUUUUAAAAAAGAAAUAUG | |
| | CUACCACUAUAAUUCAGCAUAUUAAGCAAUAAGUAUGGACAUGAAAUCCA | |
| | GAAGUCACAUAAAUUCAUCUUUAGGUCCCAGAUUGAUAGCUGCUGGGAUA | |
| | UUUUUAGAGAAUUUUGAAAAGAUUCCACAGUUUUCUUCAGCAAUUUAUUC | |
| | AAAUAUGGGCCAUUCUAUACUGUCAGCAAAUUCUCUCUGAUAUUUAACCU | |
| | GAAGCAGUAACCUAUAAAUGGUAUGCUGAGGCUCUGAGAGAGCUGGUAUA | |
| | AUUGCCAAAGUUGCAGUCUUACUACUGGGAUAUAUUUAAGGUUUGGGAAA | |
| | GUCUUAAUUCAGCACAUUUUGAAGAGCAGUAUUUUUAGUUCCUUGGGUGA | |
| | AUGGUCCUGUUUUAAUUCAGGAAACAAAAGGUGCUGGUUUAGCUAACAGU | |
| | UUGAUUUCAAUCUCUGAAGCCUUUCCACCAAUUAUUUUCUUUUUCAAGCA | |
| | AAAUCAAUCUUUCCUCCAUGUUCUCAAGUCCAAUUUAUUUAAAACACACA | |
| | CGUACAUGUCUGCAGGCACACAUACAUACACACACAUAGUAUUACAGUAC | |
| | AACUAUUAUAUACUGUUUUAGAUGUAGAUAUAGAAAGAAGUAUAGAUAUA | |
| | GAUUGCGGUUUCUUGAGUUUCUAAGAGUUUCCUUAUUGUUUGCUUCUCCA | |
| | GUGACUUUGCAAUAACCUAGCAAACUUCCAGUAAAUGUUCGCGAAAUACG | |
| | UGAAUAGUAAAUGAGAGAAAUGAGGUGGAGCUUGAAAUAAUCCUGCCACC | |
| | UUUGUUCCUAUCACUGUAAAUGUUAUGUAUACCUGUCUCUUUUCGUAGAA | |
| | AGUCUUGCACAUAUGUACCCGGAGAAGAGACAGUCAUUGGUGUGAUUGCU | |
| | GUCUUAGAGGGUAUGCUCAGCUUGAACUUUACCAGGAAACAACAAAUUAU | |
| | UUUUGAAAGUGAUUGAAAAUUUAUACUCCUACCAGCCAUGUAUAAAGGUU | |
| | CCUAUUUAUCUGUGUACUCUCUGAUCUUUGAUAUUGUCAGACUUAAUUUU | |
| | UGCCAAUCUAGUAGGUAUGUACAGGUAUCUCAUUGUGACUUUACUGAAGA | |
| | CUGGACAAUUUUCAGAUAUUUAUUUGCUCUUUAUUUUUUUAUUUUCUGUG | |
| | ACAUCUCUGUUUAGCUUUUUUGUUCUCUUUUGUUUUUCUUCUUUAUUACU | |
| | GAUUUGCAGGCAUUUUUACAUUUAUGUAAAUACUAAUAUUUUGUCUCAGG | |
| | CUGGCUUGUCUUUUUACCCUCUUUCUGGUGCUUCUUGGUGGAUAACAUUC | |
| | UUCAUUUUGAUGUAGUUGAAUUUCAUCACCCUUUUAUUUUAUAUGGUCAA | |
| | UGCUUUGUGCUUAAAAAAUCCUUUCCUACCCCAACUUUAUAAAUAUCUUU | |
| | UCCUAUAUUUUCUCUAAAAGUUUUAAGGUUCGCCACCAUUCGUUGACUGA | |
| | UCUUUCUCUCAGUAAUUUCCAAUGCCAUGUCUGUUACACAGCAAGCUAUC | |
| | AUUUAUGCAGGGGUCUGAUUCUGGGCUCUCUAUUUGUUUGGCCUGUGUGU | |
| | CUGUCCCUGAGCCUAAUUAGUAAUUUAUAUCAGUAAGGCAUUUUCUCCUA | |
| | CUCUGUCACUCUUCAGAAAUGGUGAGUUCUUCCUGCUCCUGUACUCAUCA | |
| | UGUAAAUUUUAAAAUCACUGGUUAAAUUUUAUGAAAACCUGUUAUAACUU | |
| | UCAUUGUAAUUGUAUUGAAUUUAGAAAGCCAUUUCUGGAAAUUGGCAUUU | |
| | UUUUGGUAUUGUGUCUUCCUAUCUAUUAACAUUCUGUAUUUCUUGAUUUA | |
| | UUUAGGUCUGUCAAAGUCUUUAGAAAAUAUUUAUAAUUAUUAUUCUUAGG | |
| | UCUUGCUCCUCUUUGUUACAUUACUUCACUUUUGCUACUAUUGUAACUAG | |
| | UAUAUUUUAAAAAUAUAUAUUUUCAAUCUGUGGCUGAUCAUGGAAAUAAA | |
| | AUUAGAUUUUAUAUUUUGACAUUACAACCAGCUGUUUGUUAUUGAUUAUU | |
| | AUGCAUAAUAACUUGUCUUGAGAAUCUUUUGUGUUUUACAUAAAAAUCCA | |
| | UUUUCUGCAAAUAUUAACACUGUGUUUCUUCCCUUCUAAUCUUUACUCCU | |
| | UUAAUUUUUUUCUUGUAAUUGUAUUGGGUGUUUAGUACAGUGCUGAAAAG | |
| | AAGUGCUAUUAUAGUCAUGCUCGUCUUGUUUCAUAUUGUACAGGGAAUUG | |
| | CAAUCAGAUUAUGUCUGUUGUAGGCUUUUUAUAGAUGCAUUUGAUUAGGU | |
| | UAUGGGCGCUUUUUGCGUUCUUAGCUUUAUAAGAUUUUUAAAAAUAUGCU | |
| | UGUGUUGGAUUUUUUUUAAAUUAUAUUUUUCCCUGCACUUAUUGAGAUGG | |
| | UUUUUUUAAAAAAUUUAUUGAUAUGGUGAUAAAUAUAUUUUCUAAUGAUA | |
| | AACUGCCUUUUCCUUCCUAAAAUAAGCUCAACUUGGUCAAGAUAUAUUAU | |
| | UAUGGUUUUAAAUUUAUAUUUGGAAAGUUUGCCUAUAUUUUAUUUAAUUU | |
| | UUUUGCAUCUAGUUUCAUAAGUGAAGUUGACUGAUAUUUUUUUCCCACAU | |
| | UGUGGUAUUUUAAAAAGUAUCAAUGAUAUGGUAGGCUCUUAGAGUGACUU | |
| | GAAGAUUGUGCCCUCUUUUUAUCUUUUGGGGAAGAGUUUAAAAUUUAUAA | |
| | AUAAUGUGGUAGGAUUCACCUAUACAAUAUCUGGGUCUGAUAUUUUCUUC | |
| | AUGGGAAGAUUUUUUAAAACUGUGAUUCGUUUUUAACCUAUUUAAAGCCU | |
| | ACUCUUUAUUCUUAAUACUGUUUUAAUGUUAUGUUUUUUCUAAUAAUGUG | |
| | UCCAUUUUGACUAAGUUUUUUAGUAUGUUGGUAUAAUGUGAUACACACAC | |
| | ACACACACGCGCGCGCGCGCGCGCACACACAUACACACACGCAAAAUACC | |
| | AUAGUGUUACCUUAUCUUUUUAACCUGUUUUAUCUGCAGUUGUAUAUCUG | |
| | CAGUAAUCUGCAGUUUUGUAUCUGUAGUUAUGACUUAUAUAGUUAUAUUU | |
| | AAAACUUCUUUUGAAACAAAUGUUCGUAACUGCAUAUCAGAAAAGUAUUA | |
| | CAGAAGGUAUUUAAUCAUUUAAAUUUGAGUGUGUUCUGUGCUUCCCAGAU | |
| | GCAGAAAUAAAAUAUUUUCUUUUGUUUUAUUUUCCAACACAAGAGGGCAG | |
| | CAUUGCUGCACUGUUAAUUUCCUGUAGGCUAACACCGCUGUGCCUUGUGU | |
| | AGGUUUAAAUAUACAGCACAUCUCUUUCAAAUGGAUAAUCAUUUGAGGAU | |
| | UGCAUAAAUGUGGACCUUGUCUAUUUUUCACUUACAUGACAUUCAUUGAA | |
| | AUUUAGUUUUGAAAACAAUACUCUCUGAUUAGCAUUUAUACAUGUUUUAU | |
| | AUUUGCUUCAUUGUUUCUGAUUCUGUAACAAUCACCUCAUUCUGAGAAGA | |
| | CUAGGUACUGUUGUGUUUGAUAGUGUGUAUGUAUGGUAAUUUUCUAGAAA | |
| | UCUGAAUUUUUUUAAAUGGGCUUUUCAAUGAUAUUACUGAGAAAUAGGUA | |
| | GGGUACUAUUUUGACAUAAAGGAUAAAGAACCCACAAAGUCCAUGAGCUU | |
| | CCUGUCGGAUAUGAGAGAUUAAAACUGCUGCUGACUACACCACCAGGUCC | |
| | AUGUCAAUUAACUCAUUUGCAGAUGGGAGGUGAGAGUGCAAAAAUAAUAU | |
| | UAACAUUAAUAUUAAGUACCAUUACUGGCUACUCAUUAUAGCUUAGAUUC | |
| | UUUAUUUGCUCUACUUAGAUUUAUUUUUAUAACAUCAUCCUGUAAAGUAG | |
| | GUAUUAUUACCCCCAUUUUUACAGAUGAGGAGGCAGAAGCUUGGGUUGGC | |
| | UAACUCACCCCUUAGUUCAUGAGGGUCAGAAGAGGGUGCUGAUUAAUAAA | |
| | UCCCCAGGCUUUCUCACUACUGCACACUGCCUCACCAUCAACAGCAAAAC | |
| | AGGUUGAAUUCGACGAUUCAGUAAAAAAGUAAUUUUGAUAGUUGAGUUCC | |
| | UUUAUCCCUUACCACGUCUAUUUCACAUAUAUGAUUAUUAUUAUUUUGGU | |
| | AGAGAUGAGGUCUUUUUAUGUUGUUCAGGCUGGUCUCAAACUCCUGGGCU | |
| | CAAGCAAUUCUCUUCCUCCUGAGCCUCCUAAACUGCAGGGAUUACGGGCA | |
| | UGAGCCACGUGCCUGGCUCACAUAUUUGAUUUGGUCUAGGCUAUCUUAAC | |
| | AAAAUACAAAAUGCUUUGUAAAGUCUACAUUUUAUUAUUGCAUUUGCUAU | |
| | UUUUAGCUCUUUAUGUCUGAGCAAUUGUUUAAUGCCUGUGCCUGAGAAUC | |
| | UUUUUCUCAACAGGGGAACUGCGGGGGAGAUUCCAGAAGUUCCUUUUAGA | |
| | GUUGUUGUUUCACUGUAUCAGUGCAUCGGUGACUGAGAAGGAAGUAUUUG | |
| | CUUUUGUGUGGCAGCGCAGUAAAUUCGCAGAACACAGUUCCAAGAAGCCC | |
| | AAGGCACUAGCAAGAAUGAUAGGUCACCAUCUCCAUUAUCUGUCGGUGGU | |
| | GGAUAUGGAAGAUAGCAUUCUAUAUUAACUUUUGAGAAAGAGAAAGUUAG | |
| | GCAAGAAGAGAUUGCUGAAAUAGAUUGUCUGUGAUUGCUGAGGUUGAAAG | |
| | UUUUUUAUUCUUGGCCAAGGAAUGUAUCUUUUGGGUUUAACAUCACUUUA | |
| | GGAGUCAGACAGCCUUGAAUGUUAGACUGAGCUUUGCAUUUUUUAGGUCA | |
| | UGACUUUAGGCAGAUUCCCUGAGCCUCAGAUUCAUCAUCUGUGAAAGAAA | |
| | GAUAAGACUAAUACCAAUUUAUCCAGGCUAAAAAUAUAUAUAAAAAUAUA | |
| | UUUUUUCAAACAUACACAUUCAAAAAUAAUGACCAUAUUUUUAAAUGCUA | |
| | UCCUACGUUGUGUCAAGGGCACCAGUUUCUAACUUAGAGACAUUUGCAAU | |
| | UUUGAGCAGUGUCUUCUGAGGCCACUGGGUAUCUCUAGAAAGCUUGAAGU | |
| | UUAGGAGUAAACAGAAAAAAGCUUGUGAACAUGCUUUAUAAACUGUAAAG | |
| | AUUUGUAAAUAUAUAAAAUCAUUAUAAUGGCUCCUCUCUCUGAACUCAAC | |
| | UUCCACUGGAUACAUGGCAUAUACUUUUGCAUGUAUCAACUUAGCUCAAA | |
| | UCAAUAAAAAACAUUUUUGGACUCCUGGUAAGUCCAAACAUUUAUUCAUU | |
| | AAAAAAAUUAUUAGGGACCUAAAUGUACACUGUUUUAGGCACUGGAGAUU | |
| | GGACAAGAAACAAAACAGAUGAAACCUUUGCCCGUGGAGCUUGUAUUUGU | |
| | AGAGGUGACAUAUGUGGAUCACACAUAGGUAGGAUGUUUCAUAAUAAUAU | |
| | AGAGAAAAAUAAAGUCUAGGCAAAUGGCUAGAGAAUGGUGGAGGCUUGCU | |
| | ACUUUAGAUGGAAUUGUCCAAAAGCCUUCUUUGAAGAGGGAAAAAACUGA | |
| | GCAAAGACUUGAAUGAAAGAAAGAAACCAGCCAUACAUCUGUCUAGAAAA | |
| | ACUGAGUUAUUGGCAGAGAGAACAAAAAGUCAAAGGCCUUGAAAUGAGGA | |
| | UGUGUGCCUGGUAUGUUUGCAAAAUGGCAGGAAAGCUAUGGUAAACCAUA | |
| | CAAAUUAUUGGGUUUUCCAUGUAAUCCAUUGUCUCUUUGAGAGACGAUAU | |
| | CUAUUAUAAUAUUAUAAUUUUAUAGCUCCUCUUUUAUAGGUGUUCAUAAU | |
| | AAGAAUAAAGAUAAUAAUUAGUACUUUUUGAGUACUUGCCAUGUGCUAUA | |
| | UUUGUCCUUACAACCCUCCCAAAUAAAUAUAAUUAUCCACCAUUAUACAG | |
| | AGACUCUAAAUAGCUUUCCUAAGGUAGCAUAUUCAAUAAGUUGGUGAGGC | |
| | AACGGUUUGUCUUAUUUCAAGUGCAGGGUGCAUAAUAACUCAAUGGGAAG | |
| | ACAGAUGAGUGAAAAAUGCGUAGUAAUGUCAGAGGGCUUAUGAAAGGUAC | |
| | CUAGGGAAGGUGUCAUGAAGUUACUUAGGGAAGGUGUCAUGUUAUGCCAU | |
| | AGAGGAUCAGUUCCUUAAGGAAGGAGAAGAUGGAUUGGGAGUGGAGAGAG | |
| | AAUUUCCUGCGAGAAACAAAGGCAUGAAGGCUUGAAAGAGCAUGGGGUAC | |
| | AUACGCAGUAAAUAACAAACAGUUAAGUGCGGCUGAAGAGUCUGUAGCAU | |
| | GCGAUUUAACACAGAUGCUUCUCCACUUAUAAUGAGAUUACAACCUGAUA | |
| | AACCCAUUAUAAGUUGAAAAUAUUGUUAGUCGAAAAUGCACUUAAUAUAC | |
| | GUAACCCACAGAGCAUCAUAGCUUAGCCCAGCUUACCUUACAUGUGCUUA | |
| | GAACAUUUACUUUAGCCUACGGUUGGGCAAAAUCAUCUACCACAAAGCCU | |
| | AUUUUAUAAUAAAGUAUUGAAUAUCUCAUGUAAUUGAUUGAAUACUGCAC | |
| | UGAAGUGAAAAACAGAAUAAUUGUAUGGGUACUCAAAGUAAGGUUUCUAC | |
| | AGAAUGUGCAUCCCUUUCACAACUUCCUAAGGUCAAAAAGGGGUCAGUUG | |
| | AACCAUUGUAAGUUGGGGACCAUCUGCAGACAUGCUCAGGUGCUACUUUG | |
| | CCAGGCAGGGUCUGCUACUGUAACAUAAGACACCUCCCAGCCAUGGCUGA | |
| | UUGGACAGAGGUGGAACUCUGACCCACAGGUAGCAGAAUCCACUGUUUUA | |
| | CUAGGGACAUAGGAUGUGUGUGGCUUGACUCAAGCAGCUGAGGUGACUGA | |
| | AUCAGAUUCUGACUUUCAAAACAUUGAAGCAAGGAUGCAGAAACUGUUGC | |
| | UAGUCCAUGAAGGGCCCUGGGAUAGGGAGAUUAUCCAAAUUUGGGUGGCU | |
| | CAAGAGGUCAUUGGGCCAUGGGAAAGCUGAUUAGGAAGCUAUCUACAGAA | |
| | AGAGAAAAAUGGAACAAGUACAGAGAGAAGCAAAGAUGGAAUAUUAUGAA | |
| | ACCUCGGAGAGAAAUGGAGAGCAGCAGAUCCUCAGUUUCUGUUGCAUUUC | |
| | CAGUUCUUUAGGCCUCACGAGGCAGGUCUAUGUCCUGUCCUAGAUCCCAG | |
| | AGAUCUUUCUAUCCCAAAAUUAGGGGGGCCAUGUAAUUUAGAUCCAAAAU | |
| | GGCACUCUUUUGAAAGUGAAAGUGGCUGCUAUUAAUAAUUACAGACGAAA | |
| | ACCUCCAAAUCACUGGGAAAACUGGGUUGUAUGUGGUGGUGGGCUAGGAA | |
| | GUAUUUAACAACUGGGUCCCCAGGAAACAACAGCAACAACAAGCCAGAAU | |
| | UUGAUUGGUAGUGUUUGUCGAUUUCCAUGUUGUAAAUACUCUCACCAUAG | |
| | CUGAUUUCCAGCUACCAACUGGCUUGGAAAAUUCCUGAAAAUUUAAUAAU | |
| | CACCUUUCUCAAGAUGCGACAAGUCAGCUCCCGUACACCACUGGAUGCAU | |
| | ACUGCCUUACCUAAAGUACUCUCCUUCUAUACUAACCCCCUGCCCCCACC | |
| | UUUAUUUUUACUUGGGUUUUGUGAGUUUAUUUGAACCUUGCAACUCCAAA | |
| | AGCACCGAUUAGAACAGUAGUGCGUUUGGCCCUGCGACUGCAGGCAGUGG | |
| | GAGGCCUGCCUACAAGCCUGCCCUCCAGCUCCUUGAAGAGAGAGACUAUU | |
| | UUAAACUUCCCUUUCCUCCCCAGCAUGCCCAGCACAGCGAGGAGAAUGUC | |
| | GCAGCUGUCAGUAAAUGCCUACUGCAUUAAUGCUUGAGGUGUCCCUCAUU | |
| | GCACCCCUGCAGCAAGGUUGGCCAGCUGUGAUUUACAAUUUGCCUGUCAG | |
| | CAGUGGGAAAGUAACUUUGUGACAGCAGCAAACACCAGCUUCUCAGAGGA | |
| | UUUUGAGACCUGGGUUCUGACAUUUUUACCUAGAUGUGAUUGUUGUCAGC | |
| | UUAUCAUCCCCUGUCAAGUUCUAGGCUUCCUUGAGCAGAAAAUGAAGUUU | |
| | AUUAACUCAGUUAUGGGAUGCUCUGACUCUUUAGCCACAUGGGUGCUAAC | |
| | UGCUUGAUCAGUGCCUCUCCUUAGUGUGUUCACAUUGGCCUGAGGCGAGC | |
| | CCUGUCACACUCAUUCUUCCUUCUUCAAAUAACACAAUCAUUGCCUUCCA | |
| | AAAAGCAGAAUCAUCCAUCCUGUUUUAGAAACAAACUGGUUACCCAAACU | |
| | AAUUAGCUGAGCUUGGACUGUACAAAUACCUUUUUACCUGGAAUCCAGGU | |
| | UUUUCUUUACAUUUUCCUCUCUUUUAUCCCUAUUUAUGCUUGUAUGUAAA | |
| | AAUCUUUAUACAUUUGCAGAAACUGGUAAAUUAUCAGAAGAAUUUGGUUU | |
| | CUGUCAGCUUUCCUAAAAGCAAUUAUUUUCCCUGUUUCUGAGAAGUGAUA | |
| | AGAAUAAAAAAUAUUUCCUCUGAACUUUCUGAAUAUAUUAUUGUUAAAUG | |
| | AUUGAUAUAACACUUACACUGAGAAAAAAAUUUAUUCCAGGUCAGGCACA | |
| | UGGGUGAGCUGACACACACAUAUACUUUCUUCUCUAGCAGUUCUCGGGUG | |
| | AAAGAGAAUCAGGUGAAAUGAGAAUUCUAUGCUUGUACUAAUACUGUCUU | |
| | UUAAAGUUGUUUAUUUACAAAAGUCUUCCCAGGUUACAUGCCAAGCAAUA | |
| | AAACGGUUAAACAAUUAAAAGGUUUCCAAGACAACUUAUUGCAAAGUACC | |
| | AUAAAAAGUCAGCUAUGAUAUCACACUUGUAAUUGAAGACUCUAAGUCUC | |
| | AGCUUUCAGUAAGCAUGCAUUAGUAUCAAGAAGGUCAAGAUUCAUGGAUU | |
| | CUGGUAUUUUUGGUUAUGGCAAGAGAAAUUAACUUUUAUAAACCAUAGUG | |
| | UGAAAAUCAAUUCACCAGAAAACUCUGUGUGUUUACAAUGUGUCCAUUAA | |
| | UGUCCUGGCUAAUGUAAAAUGAUGAGGACAUGAGUCUAAGUAAUAGAUGU | |
| | UCAUAAAGUGGAAUAUAUAGAGAUGUUUCUAGAGCAUUAUUUAAAUUUUG | |
| | AAAAAGAAUAACAAUUCUACAUCUCCAGUAAGUGAGCAUGAUUUAAUUUG | |
| | GACAGAUAGUGAACUGCUAUCUGACCAUUUAAAACCAUGUUGUAGAAGAA | |
| | UAUUUGCUGCUGUGAAAAGAUAUUCAGAAUAUAUUGCUAAGUGGUGAAUU | |
| | CAGCUACAAAACACUAUAAUAACAAUUUUUGCAUAUUGUGUAUGUGCAUG | |
| | UGUGUGUGUGUAUUACAUAUAGGACUAGAAAAAUAUAAUAAUUUAACAGU | |
| | GGUUAUACCCAGUGGAUAUAUCUGGGGAGAGUGAUUAAGUCAUAUUGCUC | |
| | UAUUUGCCUAUUUGCAUUUUUCACUGUGCUGUUUUUACUGUUGAAGCACG | |
| | CUCGGCUGUUUUAGUUACAGGAGAACUUAUUCUCAUGAGUGUACUGAAUU | |
| | UUGAAGGGGAUAGAAUCUUACACAAUUAACUAAAAUGAGACAUAUAUAUG | |
| | UGCCAAAUGUAUGGUGUAGGGUCCUGUAAUUCAUUACAUUCCUGCCCUUU | |
| | UAUUUAGGGACAGGUUUUAGAAAGGUGAGUGGGGGUAACCUAGAGGAGUG | |
| | AAAACACCUUGGGUAACAUGAAUUGAUGCCUGCUUAAAGAGUUAAGGCAU | |
| | UUCCUCCCCCCCCCAUGGAAAAGGAGAACAAAGCUUUUACUGUACGAUUA | |
| | AUUAGAAUUCAGCUUUGCAUAGUCUGUGGUUACAAACUUCAGUGAAAUUG | |
| | GUGCAGGAUCCUAUUCUCAAAGGGUUACAAAGCACAUAUUGUUGUCAAAG | |
| | UACCCAGUACAGAAAGAUAGCAUCCUCAGAAUAAAAAUUAAGUACAUUUU | |
| | AUAUGAAGCGAUACACAUUAGACACUUUCAUAGGUUUAAAUAUUAAACAG | |
| | UGGUGAACAGUUCCAGGAAUCUUGUGAUUUUUUUUUUUUUCAUAAAAUGA | |
| | AUGCCCUUAUUUCCCAGAAAUCCAAGACUUAACAUUUCUUAACAGCUUAU | |
| | CUGAUGGGAACAAACCCAAACUGGCAUGUAAAUAUUAUCAACCAGGAGGG | |
| | UUUCCAAUUAAUAGAUCAAGGUAAAACAAAAAUUACAUUUUAUUCAACUU | |
| | UUGCCACUAGUGCUUAGCACAGUGCAUAGCGUAUUAUUGGCACUCAACAA | |
| | AAACAUGCAUAUUUUUCUUUAAGACUGUUGAAUAAACAGAACCAACGACA | |
| | AAAAUCACGUGAUUAUCUCAAUAGAUGCAGAAAAGGCCUGCAACAAAAUU | |
| | CAACACCCCUUCAUGCUAAAAGCUCUCAGUAAACUACGUAUUGAUGGAAC | |
| | AUAUCUCAAAAUAAUGAAAGCUAUUUAUGACAAACCCACAUCCAGUAUCA | |
| | UACUGAAUGGGUAAAAGCUACAAGCAUUCCCUUUUAAAACUAGCACAAGG | |
| | AAAGGAUGCCCUCUCUCACCACUCUUAUUCAACAUAGUAUUGGAAGUUCU | |
| | GGCCAGGGCAAUCAGGCAAGAGAAAGAAAUAAAGGGUAUUCAAAUAGGAA | |
| | GAGAGGAAGUCAAAUUGUCUCUGUCUGCAGAUGACAUGAUUGUAUAUUUA | |
| | GAAAACCCCAUCAUCUCAGGCCAAAAUCUCCUUAAGCUGAUAAGCAACUU | |
| | CAGCAAAGUCUCAGGAUAUAAAAUCAAUGUGCAAAAAUCACAAGCAUUCC | |
| | UAUACACCAAUAAUAGACAAACAGAGAGCCAAAUCAUGAGUGAACUCCCA | |
| | UUCACAAUUGCUACAAAGAGAAUAAAAUACAUAAGAAUACAACUUACAAG | |
| | GUAUGUGAAGGACCUCUUCAAGAAGAAUUACAAACCACUGCUCAAGGAAA | |
| | UAAGAGGGGACAAAAACAAAAGGAAAAACAUUCCGUCCUCAUGGAUAGAA | |
| | GAAUCAAUAUCAUGAAAAUGGCCAUACUGACCAAAGUAAUUUACAGAUUC | |
| | AAUGCUAUUCCCAUCAAGCUACCAGUGACUUUCCUCACAGAAUUAGAAAA | |
| | AAUUACUUUAAAUUUUACAUGGAACCAAAAAAGAGCUCGUAUAGCCAAGA | |
| | CAAUCCUAAGCAAAAAGAACAAAGCUGGAGGCAUCACGCUACCUGACUUC | |
| | AAACUAUACUACAAGGUUACAGUAACCAAAACAGCAUGAUACUGGUACCA | |
| | AAACAGAUAUAUAGACCAAUGGAAUAGAACAGAGGCCUCAGAAAUAAUGC | |
| | CAUAAUCCGAUCUUUGACAAAUCUGACAAAAACAAACGAUGGGGAAAAGA | |
| | UUCCCUAUUUAAUAAAUGGUGUUGGGAAAACAGGCUAGCCAUAUGGAGAA | |
| | AGCUGAAACUGGAUCCCUUCCUUAAACCUUAUAUAAAAAUUAACUCAAGA | |
| | UGGAUUAAAGACUUAAACAUAAGAUCUAAAACCAUAAAAACCCUAGAAGA | |
| | AAACCUAGGCAAUACCAUUCAGGACAUAGGCAUGGGCAAAGACUUCAUGA | |
| | CUAAAACACCAAAAGCAAUGGCAACAAAAGCCAAAAUUGACAAAUGGGAU | |
| | CUAAUUAAACUAAAGAGCUUCUGCACAGCAAAAGAAACUAUCAUCAGUGU | |
| | GAACAGGCAACCUACAGAAUGGGAGAAAAUUUUUGCAAUCUAUCCAUCUG | |
| | ACAAAAGGCUAAUAUCCAGAAUCUACAAAGAACUUAAACAAAUUUACAAG | |
| | AAAAAAAACAAUCCCAUCAAAAAGUAGGUGAAGGAUAUGAACAGACACUU | |
| | CUCAAAAGAAGACAUUUAUACAGCCAACACGCAUAUGAAAAAGAGCUCAU | |
| | CAUCACUGGUCAUUAGAGCAAUGCAAAUCAAAACCACAAUGAGAUACCAU | |
| | CUCACACCAGUUAGAAUGGCAAUCAUUAAAAAGUCAGGAAACAGCAAGUU | |
| | GCUGGAGAGGAUGUGGAGAAAUAGGAAUGCUUUUACACUGUUGGUGAGAG | |
| | UGUAAAUUAGUUCAACCAUUGUGGAAGACAGUGUAGCAAUUCCUCAAGGA | |
| | UCUAGAACUAGAAAUACCAUCUGAACCAGCAAUACCCAAAGGAUUAUAAA | |
| | UCAUUCUACUAUAAAGACACAUGCACACGUAUGUUUAUUGCAGCACUGUU | |
| | CACAAUAGCAAAGACUUGAAACCAACCCAAAUGCCCAUCAGUGAUAGAUU | |
| | GGAUAAAGAAAAUGUGGCUCAUAUACACCAUGGAAUACUACGCAGCCAUA | |
| | AAAAAGGAUGAGUUCAUGUCCUUUGCAGGUACAUGGAUGAAGCUGGAAAC | |
| | CAUCAUUCUCAGCAAACAAACACAGGAACAGAAAACCAAACACUGCAUGU | |
| | UCUCACUCAUAAGUGGGAGUUGAACGAUGAAAACACAUGGACACAGGGAG | |
| | GGGAACAUCACACACCAGGGCCUUUCGAGGGGUGAGGGGCUGGGGGAGAG | |
| | AUAACAUUAGGAGAAAUACUAAUGUAGAUAAUGGGUUGAUGGGUGCAACA | |
| | AACCACCAUGGCAUGUGUAUACCUAUGUAACAAACCUGCAUGUUCUGAAC | |
| | AUGUAUCCUAGAACUUAAAGUAUAAUUUAAAAAAAGAAAAAAAAUGCAUA | |
| | CUUGAUUGAGCUAGAAAAUGUGCUUGUCUGGAGGUCUCUAAUCUGUGUUG | |
| | CUAAUACAUAGAAUGACAUAAUAGAAAGACUAUGGACCGAGAAACCAAUA | |
| | CUCAGACCAGCUGCGAUUGAGUUCUAACGCCAGCUCUUCUGUUAACUCAG | |
| | UGUAUGGGUUCUUCUCCUUGUGGCUCCAUUUACCCAUUUGUUAAAAAGAG | |
| | GAUUGGACUAGAUUAACUCUAAUGAGAGUAUCUUUCAGAUCAGAAUACCU | |
| | AAGGGUUUCUUUUCUUUCUCUAUUGCCAAAGCUCAUGUAUUUAUUAAUGU | |
| | AUUCCACAGAUGCUUAUUGAAUGUCUUCUCUGUAUGUCAGGCAUUGUGCU | |
| | AUGUCAUGCAGAACAGGCCUGUAAACAAGGCACACACAGUCCCUGGCCUU | |
| | GGGGUCCCUUCCUCCAGUGAGAAAGUUGUGUUCCCUCCUACUGGGUUGAC | |
| | UAUAAUUUUUUUUUUAAUUCACUCAUUGUUUAAAGCAAGAUCUUAGAGGA | |
| | AUGGGAAGUUAUUCUUAUUGGGAGAAUUGCUUGUCAUCAUAGAGUUCUCU | |
| | UUGAUGAGAUAGAGAAAUUUAGAAAGAUUAAACUCCUAAAUUGCAUUUCC | |
| | UUGUGAAUUGUUGUAAUGGACCAGAAUAAACACAAAUUUGGUGUUUUCUA | |
| | GCAUUUUAGUGACAGUGUGGGUACACCUCACAUUACAAUGUAAAUCCAUU | |
| | UUAAAAAUGCAGUUAGUAACUUAUGUUUUAUUAACUCUCGUAUUUUUAGA | |
| | GUACCAGAGUAAACUGACCGUUUGAAGGAAUGCUUCAUAUAGUGAGUCAU | |
| | AUUGUCAUGUAAUUAUGACCCAACCUAUAUUUUUAUUUCAUUAAAGGACU | |
| | UUUCUUAAUGCAAAGCAUCUUUAAACUUCCAUGUAAAGGAGAUAAUUAUA | |
| | UUAAAAUAUUCAUAACCACAUUUUGACACAGCAUUGCUCGUUUUGUUCCU | |
| | UUGAUCUAAUAGUUUGUAGAAAAUAGAAUGUAACAAAUUAUCUCAUUUAA | |
| | UUUUACCUGAGAAACACCGUACUUUUUCAGGGUGUAUAAGUCAGGAUAAG | |
| | CUGGCUAUGAUGCUAUAACAAACAACUCCAAACUCUCAGAGGUUUAAAAC | |
| | ACUAUAGGUUUUCUUCUUGCUCAUAUGACACAUUCAUCUUGGGUAUGGAU | |
| | GAAUUGGACUGAUCACAAUUACUCUGGAACCCAGGCUGACAGCCGCCACC | |
| | AUCUCAAACAUUUUCAUGGUAAGUGCAAGAGAGCAAAAAGAGCUCUGAGA | |
| | GGGUCUCACUUUGGCAAAGAAUUGUGUGGUUAUAUCCAGUUAUAAAUCAC | |
| | UGGCUAGAAUUAGUCACAUGCUCCAUAUUUUCACAGAGGGGCAGGAAGUA | |
| | CUAUCCUACCAUCUGCCUAGGAAGAAGACAGCUGGGACACUUGAUGAAUA | |
| | AUGCUAAUUACUACCAAACACGGUAUGGAAGAGUUGUUUUCAGGCAUUAG | |
| | CUCCCUUAAUUUGCUAGAGAAUCAAUUAACACUUGGUUAGCUUAGCAAUG | |
| | UAUUUAGUUGAAAAAACUUUUUUCUGAAUAUUUCAAAGCACUAACUUUUU | |
| | UGAGAAGAUCUACUGCAUUGUACUACAUAUUGCUGGAAUUCUAGCAACAU | |
| | CUUCAAAUUUUAGAUUUGUGACAAUAUUUGUAAUGAUAUGUAUUUUAUAC | |
| | UUUUGCCCAUGGAUAUUAAUGACAUUUUUACUGUGAUUCUCAAAAGCAUU | |
| | AAAAAAGAAGAAAGGUUAGGUCAUAUAAAUGGUAUGAUUAGUUUUGUUUC | |
| | UUUAUUUCUUUUUCCCUUGGUGUUUUUUUAGACGCAGAGUUUUGCUUUGA | |
| | AUUGCUCUUCCAGUAUUAUUUUGAGAGUGCUCUACUAGUGCUUACUCAUU | |
| | UUCCAUUCUAAUAACAAUUCUAAGCCAGAACAAAUAGGAAUUUAUCAGAA | |
| | AAUUAUGGUCCACUCUCAACUACUUCUAAAUAUCAAUCUCAAAAGUUCAU | |
| | UUAAUAAUUCAACUUUCUUAGGUAUAGUAAUAAACAAUGUAUAAGUGCCU | |
| | UUUAAUAUACAUCUUAAAGUAUUAUUUUUAUAUUUAUUAAUACUUGUAUU | |
| | CAUUUAUAAAUUUACUUAUUUAACAAACUUUUAUUGUACUCAUGUAGCAG | |
| | GCAUUCAAACUGAUUUAGUGGUUUAAAAUAUAUUUAAUUGUAUACUAAGA | |
| | AUUUAUGAGAAUUUACAAAUAUUUUCUUUUUUUUUUUUUCUAAGUAAGUU | |
| | UGUUGUGCUUUAAAGGUUGUACGGUUCUAUUCUUCCAUAUGAAACUGACA | |
| | AUACAAACCUAAAAAUGGGAAAUACAUUUUGGACUACAUGUCCAGAGGCA | |
| | GGGGCUAGACUACCUUCUUUCCUAUGGCUUUUUGCAGAAGAAUGAUACAU | |
| | GUAUUUGGAAGAUAAAUGGCAGGGAGGUAUUAGUGUAAUAUAUUGCUGUC | |
| | AAAUAUUCUGGGAUUCAUACUUUAUUCACUUAACCAGCCAAAAGUGACUA | |
| | UGUGUUUACAGUGGGUCUUAUGAUUUGGUAAGGACUUAAAAUAUAAAGAU | |
| | UAAGACAUGAGCCAUAUUCUCAUGGAGUUCACACUCAACUGGGGGAAAUA | |
| | GAUAUGCCAAUAUACAAUUAACAAGUAUAUAAUGUAAUAAGUUCUAUGGU | |
| | AAAGGUAUCUACUGAGCACAAUGGAAAUACCAACCAACCUGGAGGCAUCA | |
| | GUGAGAUCUUCCAAGAAUGGAAGUGACAUUCGAUUAGGUCUUGGGGUGAA | |
| | AUACACUGGGGAAGAAAGGAAGGAGAACAUUGCAUCUAUAACAAGCAAUG | |
| | CAUGUAUAACAAGCAGCAUGAGUGACUAAAUGAGUGAACAUGUGAAAAAA | |
| | UGUGCACCUGGAGGACUCCAUACAUGAGGUGUGCGGUGCAGUAGCAGGAA | |
| | AUGAGGCCAAAGGAAAACCCGGGUCUGGACAGGACGGGAUCUUGGCUUGA | |
| | GUUUGCCUCAAAUAAGAAAGGAUAGGCUAAAGGAUAAGAGAGGAGAGGCU | |
| | AAAGAGCUUCUGGAGAGGCAUUAACUAAAGGGAUUGGAAUUUAUCUAGUA | |
| | GGCAUCUGGGAUCAUUGAAUUGUAUAAAGCAAGAGUGACAUGGUCAGGCU | |
| | GUUAUAUUCAGGAAAAUAAGUAAUUGUAGUGAGAGACAGAGAGGAAUAAA | |
| | UUAGAGACAGUGAAGCCUGGAGGCACAAAAACUUACAUCUUGGCUUCAUC | |
| | AGCUUAAUUUGCCAGUGACUAGACGCUAGGCAAUUGAGAUAGGUGACUAA | |
| | UUUUUGUACUUUAAUUUAUAAUAUUAUGACUAUGUGCUUAGAAAAUGACA | |
| | CCUGGUCCUUUAAUAACUUGAUUGCUUUUUCUAUAUAAAACAUCUCCAUU | |
| | AAAUUUUCUUUGAAGUACCAAUGCAUUUUCUAGAAAGCAGAAGACAUGUU | |
| | AAUAGCAGCGAUUGCCUUUCUCUGCUAUGAACAUCUAUGUGGUACUAAGU | |
| | AGUUAUUUAGGCAUCUCUAUUAAUAGACAGUAAUAGGUAUGCUGGGGAGA | |
| | UUUCUAAGGGAAUCAUUUCAUGAAGCACCUUAUAUGACUUUAAUAAAAAA | |
| | CCCAUUAAUGAAUAAAGGAAUAAGUUGAUCAAGUCACACAUUUGUAGCCA | |
| | CCAGCAUAGUUUGGAGAAUGAUAUGUAGUGGAAGUGAAAUGAAAAUGCUG | |
| | AGAGUGAUAUUUAUUCCAACUAUUUCCGAAGUAGAAUAUGAUAGUCCCUG | |
| | AAAAUAUUCAGAGAGGAUGGUGUUAUCAGCAGUAUGAGCUGUUUUUGAGA | |
| | AAUCGAGAAUGUAAAUGAGGGAGAAUGAUUCAUGCCAAAAUUGACUAACU | |
| | CCAAGUAAUCAUCUCUAGAAUGCUUAAGUAGGUAUUUUGCUAUAUUCCUG | |
| | UAGCUAUAACAAUAUAUCAUUUGAAAGAUUUUCAGAAAUGAGCAUCAUUA | |
| | UCAAUAAUGAAAAAAGUAGGUCAUAAUCUCUUUUUCCUUUGGACUUUUAA | |
| | AUGCCAAGUCUUGUAUCUUAUGAAUAUAAAAUCCAUUAUCUGUGUUACCA | |
| | AGAUAUAUCCAUCAUUAUUGCUUCUCUCUGUUUUGAAAUAACAUCAUUUU | |
| | UCCUAGGCAGACUAGGUAGAUUCUGGUAUAAAAAAUUUGGUAAUAUAUUA | |
| | UGACUGUGCAUUUAUUGGAUUUUAUGUUUAUUUUAAACUUAUAUGUUUUG | |
| | AUUUUUAAGUUUCUAAACAUUUAGGUCCCUUGCACUUUCGCAUAGAAGUG | |
| | UGUUUUAAUGCAUAUGCCUUGUGGUCAGAUAGCCAGUUGUUUUGGGAAUC | |
| | AGUUUGCCAUUUAGACACUCAGUCCCCCAAAAGGCCGGGAGAAUAUUCCU | |
| | UCAAAUGGCCCACUGGGCAAAUGUGUACACUUCUUUAUCUUGCCAUAUUU | |
| | UGGAGAGGAUAUUUUUUUGUCAAUUGGGAUUAUGCAUUUGUUAGAGCCUG | |
| | UGAGUUCUUGGGAGAUCCGUGUAUCUUAGCUUUUUGAGUUUUAGAAUUUU | |
| | UUCUCGGUAUAACAUUUUAAAGGUUAGAUUAUUUGGGAAGAGGUGUGAUA | |
| | AAGCUGAAUAUAUUCCUGUGGAAGAAACAAUUUGUAAUCUGGAUUAGCUU | |
| | UCUUUGACGGAAAGUAGUUUUGGCCAAAAGGUGACAAUAUUCUUCAACUG | |
| | GUAAGUGUGGAAUUGGAUGAGAGACACAAUCAAUCUGAAGGUGUAUGCUG | |
| | UUUACCAAAAAGUAGACUAGAAAUGGAGGAAAAUGAGGAAUUAAAUUCUA | |
| | UCUAAUAUACUCUGAUUCACUUAGUGUUUCUGCAUAACUAUUUCUGGACA | |
| | UUAUUUUCAAUUUUUUCCUUUAUUUAGAUGCAGUUCCACUGUAACUAGUC | |
| | UUACUACAAGCAAGCCUUUUCAGUAAAGAGAGGAGAAAAUAUACUCUACU | |
| | GUUUUUUAUUUCUUUGGAAUCAAAUGUUUGUUGAAUGCUACAUUGGGCCA | |
| | UGCAUAGAGUUGAACAUGACAAAUUGUUGCUAAAGAAAAUUCUAGACUGG | |
| | UGAAUAAUUUGUCUUGAAUGUUUUUUGAUUGCAUUUAGGUAAAGUUGUUG | |
| | GAGCAAAGUGUUCUGUUGGCUGCAAAUCUAUCCAUUCUGUUUGUUUCAGA | |
| | AAAACCCAGGGCUAGCCAGCUUUGAGCAUUAGUUAAUUGACAAUAUUAGG | |
| | AAAAAAAAUCAGCUCCAGAACCAUUUCCAUUGAUUGGGAAGACACACAGA | |
| | AUUAUUCCUUAAAGUGGUCCCAUUUCCAUAGAAGGAAACUGAAGGUAAAU | |
| | GAGUGACAGAAUUGCUUCAACCCACAGAUAAUUAUGAAUGAAUGUAGAUU | |
| | UACUAAUGUAGGUACUCAAACUCAGUGACUAUGUUUAUAUUGAUAUAUAA | |
| | AAUAUAUAUUUAUCUUUAUGAUUUUAUGUAUAAAAUAAUAUAUACUGUAU | |
| | UUUAUAGAGUAACUGAUUUUUAGAAGAGACAUUUUGGUUGGAGAAAGAUG | |
| | UUUAGAGUGAGACAGCUGGGUUUGAAUAAAACUUCAGUACUUAGUAUUUU | |
| | UCAGCUUUGAAUCUCAGAACAAGAGUUUCUUUGAAUGUACAAUGGGAGAU | |
| | GAAAGUACAUAUCAUGCAAAGUUGUUACUAUAUUUGCAAACUUGGACACA | |
| | AUAGACACCUAGGAAUUGGUAGUUAUUAUCCUUUUGCUACUAAUUUAUGU | |
| | UUAACAAAUAUUCCAGCGCUAUUGUGAUCAGAAGACUGCAGGAAGGUAUU | |
| | GUGGGAAAAACACUAAAAGGAACAACACAAGAUCUCUCUCUUUAAAGGAC | |
| | UUUGAUACAGUUUUUGAAGAGACAGACACAUUCAUACAUCCAAUAAAUCU | |
| | UAAAGAAUUCUAAUCUAAAGCAUACAAAACAAUGCAAAACCAUUAUAGGA | |
| | CAUAAAUGUAGCACUGGGUUUUUUUUUUUCUUUUUUCUCUUGAGACAGUC | |
| | UUGCCCUGUCACCCAAGCUGGAAAGCAAUGGCACGAUGCCGGCUCACUGU | |
| | AACGUCCACCUCCUGGGUUCAAACAAUUCCCCUGCCUCAGCCUCCCGAGU | |
| | AGCUGGGACUGCAGGUGCAUGCCACCAUGCCCAGCUAAUUUUUGGAUUUU | |
| | UAGUAGAGAUGGAGUUUUGCCAUGUUGAUCAGGCUGGUCUUGAGCUUCUG | |
| | ACCUCAGGUGGUCUGCCUGCCUCAGCCUCCCAAAGUGCUGGAAUUACAGG | |
| | UGUGAGCCACUAUACCUGGCCUGGAAUAAUUUUUAUGUCACCAAGAUGGA | |
| | AAUUUUAGAUCACGGUUGCCCUCUUUUCCAAUUUCUACUUAGAGAUUUCC | |
| | UCCUUACAUGUGGCGAUAAUAAAGUACUUUUAAUAAACUAAAAAAUGUUC | |
| | UUAAAAACCAUUAUCAAUAAUUAUGAUGUGAUCAAUGACAAUAAAUAGAC | |
| | UAUUUGUAAUUAUCAUGGAUUGCUUCAACCUGAUUCUAUAUUAAGGUCUC | |
| | AUUGUUAUUUCUAAUAAACUACUGAUUGCUAAAGCUGCAUUUUUAAGUUG | |
| | GCUCAUUAUAUAGGAAAUAUUCAGAUGUUAACAUAACUAUAGGUGCUCAU | |
| | AGUUGAUCACUCUACAAUGCUUGGGUGUUGCCAUUCCCUUCUCCCUGGGU | |
| | CAUGGCAGACAUUACCUAUUAAUCAAGGCAUCUUUGUUUCUAUUCAUUGC | |
| | AGUCUCACAAACCUUCUCAUGUCAGUGUGAUAUGGUUUAGAUUUGUGUCC | |
| | CUGCCCAAAUCUCAUAUUGAAUUGGAGGAGGGAUCUGGUGGGAGGUGAAU | |
| | GAAUCAUGGGGGUGGAAUUUCCCUUGGUGUUCUUGUGAUAGUGGGUGAAC | |
| | UCUCACAAGAUCUGAUGGUUUAAAGUGUGUGGCACUUCCCCCUUGCUCUC | |
| | UUUCUCUUCUGCUUCACCAUAGUAUGAUGCGCUUGCUUCCCUUUCACCUU | |
| | CCAUCAUGACUGUAAGUUUCCUGAGGCCUCCUAGCCAUGCUUCCUGUACA | |
| | UCCUGUGAACUGUCAGUCAAUUAUACCUCUUUUUUUCAUAAAUUACCCAG | |
| | UCUCAAGUAGUUGUUUAUAGCAGCAUAAGAACAGACUAAUACAGAAAUUU | |
| | GAUACUGGGGGAGUGGGGCACUCUUAUAAAGACAGCUGAAAAUGUGGAAG | |
| | CAACUUUUGUAACUGGGUAAUGCUCAAAGGUUGGAACAGUUUGGAGGACU | |
| | CAGAAUAAGACAGGAAGAUGUGGGAAAGUGUUGAACUUCCUAGAGACUUG | |
| | UUGAAUGGUUUUGACCAAAAUGCUGAUAGUGAUAUGGACAAUGAAGUCUA | |
| | GGCUGAGGUGAUCUUAGAUGGAAAUGAGAAACUUAUUCAGAACUGGAGUA | |
| | AAGUUGACUCUUGCUAUGUUUUAGCAAAGAGACUGGUGGCAUUUUGCACC | |
| | UGCCCUAGAGAUCUGUGGAACUUUGAACUUGAGAGAUGAUUUAGGCUAUC | |
| | UGGUGGAAGAAACUUCUAAGCAGCAAAGCAUUCAGGAUGUAACCUGGCUG | |
| | UUUCUAAAAGUGUAUGCUCAUAUGCAUGGGCAAAGAGAUUAUCUGAAACU | |
| | GGAACUUAUAUUUAAAAGGGAAGUAGAGUGUAAAAGUUCAGAAAAUUUGC | |
| | AGCCUGGCCAUGUGGUAGAAAAGAAAAACCCAUUUUCUGGGUAGAAAUUC | |
| | AAGCCUACUUCAGAAAUUUGCAUAAGGAAAGAGGAGCUGAAUGAUAAUAG | |
| | CCAAGACAAUGGGGAAAAUGUUUCCAGGGCAUUUCAGGGACCUUCACUGC | |
| | AGCUCCCAUUACAGGCCCAGAGGUGUAGGAGGGAAAAAUGGUUUUGUGGA | |
| | CCUGGCCCAGGGCCCUGUUGCUGUCUGUAGCCUUGGAACAAGGCACCUUG | |
| | CAUCCCAGACACUCCAGCUCCAGCUGUGGCUAAAAGGAGCCAGGGUACAG | |
| | CUCAGGCCAUUGCUUCAGGGGGAGUAAGCCCCAAGCCUUGGUGGCUUCCA | |
| | UCUGGUGUUGGGCUUGCAGGUGCACAGAAGACAGGAGUUGAGGAUUGGAA | |
| | ACCUCCACCUAGAUUUCAGAGGAUGUAUGAAAACAUCUGGAUGUCAAGGU | |
| | AGAAGUCUGCUUCAGGGGUGGAGCCCUCCUGGAGAACCUCUACUAGGGUA | |
| | GUGUGGAGGGGAACUGUGGGGUUGAAGCUCCCACACAGAGUCCCCACUGA | |
| | GACACUGCCCAGUGGAGCUGUGAGAAGAGGACCACUGUCCUCCAGACCCC | |
| | AGAAUGGUAGAUCCAUCGACAGCUUGCACCAUGUGCCUGGAAAAGCCUCA | |
| | GGUACUCAAUGCCAGCCUGUGAAAGCAGAUGUAGGGGCUGUAUGCAGUAA | |
| | AGCCACAGUGGCAGAGCUGCCCAAGGCCUUGGGAGCCCACCCCUUGAAUC | |
| | AGCAUGCCCUGGAUGAGAGACAUGGAGUCUAAGGACAUUAUUUUGCAGCU | |
| | UUAAGAUUUAAUGACCACCCUGCUGGAUUUCAGACUGGCACGGUGCCUGU | |
| | AGCCCCUUUGGUUUGGCUGCUUUCUUCCUUUUGGAAUGGGAGCAUUUACA | |
| | UAAUUCCUGUACCCUCAUUUUAUUUUGGAAGUAAUUAACUUGUGUUUGAU | |
| | UUUACAGGCUUAUAGGCAGAAGGGGCUUGCCUUGUCUCAGAUUAGACUUU | |
| | GGACUUGGACUUUUGAGUUAAUGCUGGAAUGAGUUAAGACUCUGUGGGAC | |
| | UGUUGGGGAGGCAUGAUUGGUUUUGAAAUGUGAGAAGGUCAUGAGAUUUG | |
| | GGAGGGUCCAGGGAUGGAAUGAUAUGGUUUGGGUUUGUGUCCCCAACCAA | |
| | AUCUCAUGUCAAAUUGGAGGCGGGACCUGGUGAGAGGUGAUUAGAUUAUG | |
| | GGGGCAGAUUUCCCCUUGGUGUUCUUGUGAUAGUGAGUGAGUUCUCAUAA | |
| | GAUCUGAUGAUUUAAAAGUGUGUGGCACUUCCUGCUUAUCUCUCUGUCUC | |
| | UCCUGCCCACUUGUGGUAAGACGUGCUUGCUUCCCAUUUACCUUCCAUCA | |
| | UGAUUUAAGUUUCCUGAGGCUUCCUAGCAAUGCUUCUUGUACAGCCUGCA | |
| | GAACUGUGAGUCAAUUAAAUCUCUUUUCUUCAUAAAUUACUCAGUCUUAG | |
| | GUAGUUCUUUAUAGCAGUGUGAGAAUGGACUAACAGAGUGUUUCAGGUAG | |
| | UCACAGCCAACUAGUUUGACUUGACACAUGUGAUAGGAUCUAUUUUUCAU | |
| | CCCAUCAUAAGCAUUUUUGAGUUUGAGAAAGUUCACACUCACUAUGUUAA | |
| | CUGAAGCUACCUUGUAGCCCUGUAAAUCUAUUUUUAGGAAACUUGAUCUA | |
| | CUAGUUAUAAUUCUCCCUUUUUCUUCUGGUCUCAUUAUAUGCUAGAAUUC | |
| | CUUGAUUAUCAACUCUGAAAACAUGGCAGAAUGCAGUGGUUCACAAAUAU | |
| | UGGUGUGCAUCAGAUUCACCUGAAGACUUGUUAAGGGAUUUCUGGGUCCC | |
| | ACUCCCCAGAGUUUCUGAUUCAGUAGGUAGCAAUAUUUUAAACAGGUUUA | |
| | GAAAGCUUUUAAGAGAUAUAAACUCAAGUGAUGCCUUUGGUGCCAAUCAU | |
| | GGAGCCACAUUUGGAGAACUACUGACAUAAUGAAAAGAACAUAGACUUAA | |
| | UUACAGAGAAAAAAGCAUUGAGAGCAUCAUUACUAGAUUCUUGAAACUCA | |
| | AUUGUUUUCAAUGAAGUUUUCCCAAUAAUAAAGCCUGUAUCAUGGAAUUA | |
| | CUUGAAGCAUUACCUGAGAAAUAUUUCAAAUAUUUAGCAGUAAUAACCCC | |
| | UCAGUGAAUGUACAUUCACUGUACUUUUUGUACUUUGUGCACUUUGUAAU | |
| | AAAAAAAUCAGAUCUAACAUUGUUCUAUGUACCAUAGGGAAAUGGAGAUG | |
| | GCGAUGUAUAGUUCUUGUUCUUUCUUCCAUGAACUGUUGUUACAUAUUCU | |
| | AAUCUUCAGAAACUCACUUUGUGUUAUCCUAUACAGCAUACCAUAUUUGC | |
| | UCUUUGCUCUGAAAAGCUUGCUUUAGGCACUAAGGAGAAAGUUUUACUUU | |
| | UUUACUUUGAGUUUGGAGAAGUGCACAAAUGGUAAUCCAGCAGGUAACUG | |
| | UGUAUAAAAGCUGUGGAGCCACAUUAGGCUGGGAUUUCCCUCUUUACAGG | |
| | UAAUAUUUUUAAAUGAAUGUGAUAAUACUUAGAGCAUAUUUUACAUCCUG | |
| | CAAAGGAGUAUACUAUUCAAAUAUUUGUGCCAGAUUGCGUUGUAAAUGCA | |
| | GCACCAUUUAAUUUUAAUUUAAUUUAAUUUUUAAUUUUUUUUUUUUUUUU | |
| | UUUGAGAUGGGGUUUUGCUCUUGUUGCCCAGGCUGGAGUGCAAUGGUGCG | |
| | GUCUCAGCUCACUGCAACGUCCGCCUCCCAGGUUCAAGUGAUUCUCCUGC | |
| | CUCAGCCUCCAGAGUAGUUGGGAUUACAGGCGCCCACCAGCACACCCGGG | |
| | UAAUUUUUGUAUUUUUAGUAGAGAUGGGGUUUCACCAUGUUUGCCAGGCU | |
| | GGUCUCGAACUCCUGAUCUCAGGUGAUCCACCCGCCUUGGCCUCCUAAAG | |
| | UACUGGGAUUACCAGUAUGAGACACUGCUCCUGGGUGCACUACCAUUUAA | |
| | UUUUAAAUUUUCACUUAUUAGUUCACUUGAAUUGCCCUGAAGAAUACUUG | |
| | GUCCGAACAUUUACAUCUAUGGAUAAGGCACUGAGAAACAGAAAGCCUGA | |
| | AGGAAUUUCUCAAGGAUGAUGAAGAACCUGGCUUAGGUUUGAUCUCAAAA | |
| | CACAGACUCCUUAUAAAUAAUUCACUCACUUAGGUCAUUCUCCUCCAUGA | |
| | UUGCUCUUCAGUUUACCAGAGGUUUAAUUUGUUUCCCCAAGUAUUUUCAC | |
| | AUGCAGAUUCUUUAUAUAUUACUGUAUUUUUGUGCUUAGUAAUCUUAAUA | |
| | AAAAUAUCAAGAGUACUGUUUAGGAAAUAUGUUAUCUAUGGCAAAAUAGU | |
| | UCUUAAUUAUAAUGUAGUGUUUUUGGACAGUAUAAAUGAUAGCUUAGAAU | |
| | UGAAAAGAGAAUUACUAUGCUUACCAUAAAUCUCCUUGACAACAAGUUCA | |
| | AUGUUUUGAAUACUGAAUCAUUUAGAAUUUUAUGCAGAUUUAUAGGUCUC | |
| | UCACCUUGGCAUCUCAUUCCUUUUUUAUACAUCUGGGAUUUUAACAGAUG | |
| | UAUAAAAUCUGUUAUAAUUAUUACUGCUUUAUUUAUCCCCAUAAUUGUUA | |
| | CUGCUUUAACAAAUAUUUUUGGCCGUCCAACUCAUUUGUAUUUGAAAUGU | |
| | UUGCCUAGUUUUUACUAUCAUCAUCAUCAUCCAUCAUCUUCAUCUUUCUU | |
| | CAAUAUUUAUUGAGCUUUGAAAAACUGUGAAAAUCAACUUCAAAGAACAU | |
| | CUUGAUUACUUUACUGAAAUGAAGGUCCUUAUUGGAACCCUCACUCCAGA | |
| | AAAAAAGAAGUGAUUCACAGAUUCUGGGUCUUCUUUCUAAGGGAUAUAUA | |
| | AUGUCAGUUAGGCAGUUACCAUCCCCCAAACUGCUUGCUUCUCAUUUUGU | |
| | AAUGAAAAGAAAGCUCUCUCAGCAUAUAGUAUUCUGUACAGAUUGCCUUC | |
| | CUGCCUUUGGCGGAGCUCCUGUUUCUCUGUGAAUCAUUCCUUGGUACACA | |
| | GUGUUACCAUUGUGUUAUCUGAAAGAGCGAAUCCUGCUGGGUGGUGGUGC | |
| | CGCUACUCCAUUGGGAAGGUCACAAGUUCAUGUCUGCUUUGCCUUCUGUC | |
| | UAGUGAAAUGUGUUCCCACUAAGGAAUAGAGAAUUGCAAUAUUUUUCUGC | |
| | UUAUGGAAGGUCAGGCGUUCAGUGGUACCCUAGCAGUGUUGGCUAAAAGG | |
| | CCAUCAAUAGUGGCAAAUUCAAGGCAAGGCUUAAUCUUGCCUGUUGUCUA | |
| | UCAUUCCACAUGUUUUUUUACACCUCUUCUCAGUGGCUGAAAAAUGAAUU | |
| | UGCUUAAGGACUUGGUUGAAGUGACUGAGGAUGAAGCAGGAGGCCCUUAA | |
| | UGGGACCCUGGAGUGAAAGCGCUUGCAGUUUAACUAAGUGGUCUUUAUUG | |
| | AUUAAGCAGGCAUUUAUUGAACAUCAGCUCUAUGCCAGACACUGCUUUAG | |
| | GUGCUGGAGUUACUGAGGUAAAUGAAACACCAAAGGUCUCUGUUGUUUCA | |
| | GGGCUUUUAUUCUAGUGGAGGUGUCAGGCAAUAGCAAUGGCAGAGAGUGA | |
| | GUGACAGAAGCUGUUAGGAGAUUAAAGCUGAGGAAGGUACGAGAAAGGGC | |
| | AGGGCUGUUGUUUUACAUCAGGUCAUUAGGGACAGACUUUCUGAGGAGAA | |
| | GACGUAUGAACAGAAGAGAACCAUAGAAAGAUCUAGAGAGAGAGCUUUCC | |
| | AGAAAGAGGUAAAAGCAAACAGAUCCUGAAGUGAGUGUGAGUCGCCAUGA | |
| | GACGGGUGCCACAAAUUCAACAUUUGUUUGAAAUAAGAAUAUUUUGUUGA | |
| | UAAUGAUUAUACACAUCUAUAUAAAAUACAUUUGAAAACACGACAUUAUG | |
| | CACAAAAAACCAUCACCACUUUUAAAAAUAUGUGUAUAUAAUGAAGGUAU | |
| | AAAAUAAUAUUUUCUGUCAUAAAUUUUUCCCCAGUAGAGCCAUCAUAGGG | |
| | UUAAAACAAUAUGUUUUAUACAUAAUGUACUGUAACUGCUUUUUUAACAA | |
| | CUGAAAAUGUACAGAAAAAUGGUGUUUUGACUGUCUAUCUUUAGUCUUCA | |
| | GCUGUUGCUGUCACGAUUCAGAAAUUUGGAUCUCUGCCUUAAGAAGCACA | |
| | UUUUCUUAGCUAUAAAAAAAUCUGAUGGAAUCUACAACUGUAAUCAUAGG | |
| | CUGUGACUUUAGAAUAUAAAUCACUUGUUAUAAAAGGGGGGUGUUGGUGU | |
| | UUCUUUUCUUUUCAUUUGAUUCUCAUUUGUGUUCUCAAUAUGCUUUACUU | |
| | UGAGUUUGUUCGUAUUUGGAUGAAGAUAAAAUUUUCCUUGGCUUCAGUGU | |
| | GUGGCAAGCAGUGCCCAUUUAUUUUAAUAGAUACUGUACCAACUAAAUCC | |
| | CAAUAUGUGUCAGGAAAUUCAGAAAACUGAACCCAGAAAUGAUGCUAGAC | |
| | ACAGAUAGAAAGGAGGACUUCAAAAAUUCCUACAUGUUACUUUGGUGAUU | |
| | GGUGUGAAGGAGUACUUUAUAGUAUCUUCUAAAAGUACAGUUACUUUCAG | |
| | AAAAAUGAGAAAAAUUUAAAAAGAUUAAAAAACACAGUAUCAUUAGAAUU | |
| | UGGUCUCUUGCCUCUAAAUUUUCUAAAUUACCAAAAAUAAAAUAAAAGAA | |
| | AUUUAUUGGCUAUAGAUAAUAUAGCACAAAUUGGAUAAUUUUAAAUCUCA | |
| | GACAUGUAAAAUCAGUACAGAUUUCACACCAAAACACUAUUUGUAGCAAU | |
| | AGUAGCCAUGAGAAUUAAGUAUCUGACCUGGGAGGCCCCAAAAUAUCAAU | |
| | CUCAGGUGUGUCCGUUAGAAGGUAAAAAAUCUGGAAAUAGAAUCCUGAGA | |
| | UGAUAUUUCUACCUAUAAUACUUAAGGUAAAGAAAAGGAGGUACAUAAGA | |
| | AACGUUUCUAGAUUUUAACACAAGAGACAAAUAAAUUCUUUUUGACAUGA | |
| | AAGACAAAUAAAUUUUGAGUUGCAAAUGAGUGAACAUGCCAAGGUACGUU | |
| | AAACUAAUAUACUUUCUUCCAAAACUGGCUUAAGAUUGGUAAAAGUGCAU | |
| | UCAGGCGAAAUUAUUUUUAAAAAUUACUCAUUAAUAAAAUUUUGCUAAUU | |
| | UUUGUUGCUUAUUCAAAUUGCUUUGUGUUGUCCUGAAAUAUGAAAUUAUG | |
| | GAGAAACAAUUCUAGUUUCAGGAUACAACUUAAUUGGAGUUAAUAGGUUU | |
| | UUAAUACAGUGUGUUGUAUUUAUGUGUAUAUAAAUAUGGCGUAUUCAUGU | |
| | UUCCUUUUUUUUUUUUUUGCAAUAAAGUAUAGUGGAUUAAAGCCUAAGUU | |
| | UUGAAGUCAGAUGUUUUUGGGUUCCAAUACUUACCAACUGGUUGACCUUG | |
| | GGUAAUUCAUCUAAUGUUUCUGUAAUUCAGUUUCUUUAUCCGUAAAGUGU | |
| | AGAUUAUACAGUUCAAAGGGGGUAUUAUAAGGUUAAAUGUGAUAAUGUGA | |
| | UGAUAAUGUAUAUAAAAUUAACUAGUACAUAGCAAACUCUCAAUAAAUAA | |
| | UGGUUAUUAUCUCUUAGUUCCCAGUGGUUCUCUCUUUCUCUUUCUGCCUU | |
| | CCCCCCAAGAAAGGGCUGGAACUGAUUCUUUUCUCAUAGCCCUUAGAAAG | |
| | AACUAACUCAGCUGAUGCCUUCAUUUUUGGACGUCUAGCUCCCAGAACUG | |
| | UGAGACAAUAAAUUUCUGUUGAUUAAGCCACCCAGACUGUGGUAUUACCA | |
| | AGAAGUACUAAGGUAGUGCUGUAAAAAUACUUUAAAAUGUGGAAUUUGGA | |
| | AUUUGGUUGGCAGAGACUGGAAGAGAUUUGAAGUGCUUGGUAGGAAAGGU | |
| | CUAGAUUGCCUCCAGGAGACUAUUGUUAGACUUAUGAAUGUUAAAGAUGU | |
| | UUCUGAUGAAGUUUCAGACAGAAAUAAGGAACAUCUUCUUGGAAACUGGA | |
| | GGAACGGUGAUCCUUAUUAUAAAAUAGAAAAGAACGUGGCCUACUUGUGU | |
| | UCUAGUUUCUUUGUGAAAAAUAGAACUUAUAGGUGAUGAACUUGGAUAUU | |
| | UAGCUGAGGAGCUUUCUAAGCAAAGGGUCGCAAACACAUCCUGGUUUCUC | |
| | CUUACUGUUUAUAGUAAACUGUGAAGGGACAGACUACAUUGAAGAAGGAG | |
| | UUGUUAAGCAAAACGUAACCAGAGUGUGAAGACUGGAAAAAUUCUCAGCC | |
| | UAUCUACAUUGCAAGAAAUGAGAAAACGUGUUCUGGAGAGAGCAUCAAAA | |
| | GUGUGACUAGACAAUCAUUUGCUACAAAGAGAAGCAUGUGACUCAUUAAU | |
| | CCAAUCAACCAUCUCAGCAAAAGACAGGAAUAGAUAUGUGAUCAUCCAGG | |
| | AAACAUCUGUGAAAGACCCUCUUGUCUGGUGGUUUGGAACCCUGUGAAUU | |
| | GCACAGGAGGCCAACAAGAUUUUUGAGAGUUUUCUAUCAGCAGAAACACU | |
| | ACAAACUCUGACUGAAGGUGACAGAACUGGGAUGAAGUGAAGGAAAAUGG | |
| | UCAGACUUCUGGGAUUCUACAAGCAGGAAAUGGGUUGAUUGAACUAUCUG | |
| | GCUGGUUGAUAAUGCAGAUAGUUUUUAAGAAAAGAGAAGAAUGAUCCAGA | |
| | AGGUAGUUUAGAGGCCAGCAGAGCUGCUUCUGUCAUCAUUGGUCCAGAGA | |
| | GCACAAGCCUGGCAACACUGGGGCCAUCGCCUCAUUGGUUCCAGAAAAAU | |
| | AGGACCACCUCCUUGGUUUCAGAGGGCAGGUCUGGCCACUAAUGCUCAGG | |
| | UUCUAGAAAACUGGUGCCACCCCAUUCAUGGGCCCAAAGGACAGAACACU | |
| | GAGCCAAAGAGGAUUAUUCUCAAGCCUCAACAUCUAAUGGAAUUUUUCGU | |
| | GCUAGGUUUUGGACUUAUGAUCUCUUUCUUCCUUUUGGAAUAGGAAUGUU | |
| | UGUCCUGUGCCUGUCCCACCAUUGUAUUUUCAAAUCAGAUAACUCAUUGU | |
| | CUGGAUUUAUAGGUUUCCAGAUGGAGAAGAACUUUGCCGCAGGAUGAAUC | |
| | AUACUUCAAGUUUCACCCAUAAUCGAUUUGGAUGAUUUAAAUGAGAUUUG | |
| | AGGCUCAGAGUUGAUGCUGGAACAAUUAAGACUUUUGGAGGUGUUGUGAU | |
| | GGGGUGAAUGUAUUUUGCAUAUGACAGACAACGACAUGAAUUUUUGGGGU | |
| | CAGAGGAUGGACGUUUAUGGGUUUGUGUCCUCCCCAAAUCAUAUGUUGAA | |
| | AUUCUAACCCCCAGUACCUCAGAAAGUGACCUAUUUUGGAGAAAAGAUCU | |
| | UUACAGAGAUUAUAAAGUUAAAAUAAGGUCAUUAAGGUGGGUCCUAAGCC | |
| | AACAUGACUGGUAUCUUUAUUAAAAACGGUAAUUGCAACAUUGAGACAGC | |
| | AUAAAGGGAAAGCCAUGUGAAGAGGCAUAGGGAGAAGGCAGCCAUCUAUA | |
| | AGCCACGGAGAAAGGCCUGCAACAUAUUCUUCCCUCACAACCCUCAGAGG | |
| | AGCCGAUUCUGCUGACACCUUGAUUUUGGAAGUCUAGCUUCCAGAACAGU | |
| | GAGACAAUACAUUUCUGUUAUUUAAACCACCCACUCAUUUGUACUUUGUU | |
| | AUGGAAGCCCUAAUAACGUAAUAUAUACUAUUGUGUAUGUCAGAGGUUCA | |
| | GACUGUAUUAUCAAAAAGGAUCUAAUUUAUAUUGUAUAAGGAUAGUUGAA | |
| | CGAGUAUAGUUAUUUAGGAUGGAAGAGAAAAGUAUUAAAGAAAAUAUCUU | |
| | UGCAGGGCUAUAUAUGACCCAGGAAUCCUACAUUUGGGUAUUUUCCAUAG | |
| | AGGAAUGACAGCUUAUAUUCACACAAAAACCUGUACACGGAUGUUUACAG | |
| | AAGCUCUAUUUAUAAUUGAGCUCAAAACUAGAAACAGCCCAAUUGUCCUU | |
| | CAGUGGGCAAAUAAGUAAACAAACUGGUAGAGACUUACAAUGGAAUGCUA | |
| | UUUGGCAAUAAAAAUUAAUGAACUAUUAAUAAAUGUACAUCUUAGCUAAA | |
| | CUUCAAGGACAUUGUGCUGAAUAAAAACUUGAUCUUAGCAGUUUAAACGC | |
| | UAUAUGAUUCCAUUUAUAUGAUAUGAUUGAAAAGACAAAUCAGUGAUGGA | |
| | GAACAGAUCACAGAUUGCCAGGGAUUAGUGGUGGCAGGAAGGAUGUGACU | |
| | AUAAAGGUGUAGCAGAGAAAGUUUUCUGAGGGUGACACAACUAUUCUAUA | |
| | UCCUGAACAUAUUGGUAAUUGCAAGAAUAUCUAUGUGUGUCAACUUUCAU | |
| | AGAACCCUACACCAAAAAAGGUGAAUUUUAUUUCGUGAUAAAUUAAAAAG | |
| | UAAAACAAAAGAGACAAAAAUAGUAACCAGGGAAGCUUUCAAAAAAUAUA | |
| | UGUUCUUGUUCAAGACCAGCAUGGCCAACAUGGCGAAAUCCCAUCUCUAA | |
| | UAAAAAUAGAAAAAUUAGCCAGGCGUGGUGGUGGGCGCAUGUAGUCCCAG | |
| | CUAUUCAGACGGCUGAGGCAGGAUAAUUGCUUAAACCUGAGAGGUGGAGG | |
| | UUGCAGUGAGCCGAGAUGGUGCCACUGCACUUCCAGCCUGGGUGACAGAG | |
| | UGAGAUUCCAUCUCAAAAACAAACAAACAAACAAAAUAUAUAUAUGUUAU | |
| | CUUUAAAAGUCUUUGCUAAAACUCUCAGCAUGCUUACAUAUCAAAUGUCU | |
| | CAAGCCUUUGAUUUUACAUAUGUAAUAUUGCAGUGUUUUGAUUAUAUGAA | |
| | AUAUUAUAUUGAAGUAAAUUUGAUUAACUCUAAAUUUAAUUUUAAAUUUA | |
| | AAUUUAAAUUCUAGGACUUUAUAGCAAGUCUUGACAAAUAAAAUUCUAUU | |
| | UUCUUCGUUAUGAACUAAUGAGCCAUCAUCAUUAAUGUUACUGAAAUUUU | |
| | UAAAAAUUCUAAUAUGAACAGAUUUAAAAUAAACAGACUAUGUAGUGAAA | |
| | AACAAAUCUUGAAAUUAAGUCAGCUGAUCUUGAUCUAACCUACCAUUUUG | |
| | GAAGAAUUUUCUACAUUGAUAUGUAUUAUGUACCCUUAUAAGGCUCAUAG | |
| | UAGUAAAAUAUUAAUUUAGGAAAAUAUUGUCUCUGUGAAAUAGCUUGUGA | |
| | AUGUCCACUUAAACACAUAAUGGAUCUCUGCAUAUUGUUCUUUUUUUAAG | |
| | AGCAGUGGAGUGGAUUUGAUUUAAUAUUAAUGUGUGCUAUACUCUAUGAU | |
| | CUCUGUAGUAUCACAGUUAACUGGACUUAUAUAGGCAAUUAUUUACAUUU | |
| | AAAAUUUUACAGUGUAGAUUAAUACUAUGUUAUUUUUUUCUUAUCUAUUU | |
| | CAGACAAGACUACUGACAAAGUAGGAAAUAAUAAAAAGAUAAAAGCUUAU | |
| | UUUAGAGAAAGAGGUUUUCCCAAAUAUAACUUUGUUUCUAACAGCUAUGU | |
| | CCUUAAUAUUUUAUUCAUUUGAAAUCACCCUUAUAGACAAUUUGCUGACA | |
| | GGUUAAUAUUAUCUUUGGGAACUGGAGUACCCUCUUUUAGUGUGGUUUUU | |
| | ACAACAUCUACCAUGGGAACAGCUUCCCCUUCCAUUUAGGUAUCUGACUC | |
| | AUCCUUGCUAAUAUAUCUUGAUUUAAUGAUGACCUAGGGAAGAAAGAGAG | |
| | GAACUCCCUUAGUAUUUUUAUUCUAUGUAAUCUGCCUUCUCAGAAUGUGC | |
| | CUUGUGAAAGAAGCACCUAAUUACUCUGCUAAAACCAGAAAGCACUGUGA | |
| | GGAGAAAGCCUGGCAAGUUUCUCCUACCAGUCUGCCACCUAAUGAAUAGA | |
| | AAUUGCAACACACUGGUAUUCUGCUUUUGCACUGCGGCAGGAAUGUGAAU | |
| | AAUAAUAAUUAUUAUUAUUAAAAGAACAAAGAAAUGUUAGCUAAAAUGGU | |
| | AAACAUAGAUAAACUGCUGUGAUUUAAGAAGUUUCCAUUUGGAAUCCUCU | |
| | GUAAGCUCAAGUAUAAAAAGGAUAUUGGCUGUAAUCACUUUCAAGACAGU | |
| | AACAAAAAUGCAGGGCUAAUAGCAGGGCAUGAUUUGACGUGCCAAAUUUA | |
| | UUUUUCUUUCAUAUAUUUAACUGCUAAAUAUUAAUCAAUCAGAAUACACA | |
| | AUGUCAGCCUCUGAAGAUACAAAGGUGAAUACGAUAGUUUAUGUCCUUGG | |
| | AGAGCUCAUAGAUUAGGCCAGGAGACAAAUGAAAAAAAGUACCAUAACAU | |
| | AUCACAAAACAUUCUGAGGGAGACAGCCAAUGCUGGUGGAGUACAGAUGG | |
| | AUGAAACAGCUGACUCUUCUUAUGGAAGUUGAGAAAAAAUUUACUGAAGA | |
| | GUUUUCCUUUGAAUUUAGCCUUAAUGGAUGAGACAUGACAUGCUUGACAA | |
| | AGAUGAUAGAGAAAUAACACUUCAGACAGUGAAAACUGCACAAAAUAAUA | |
| | AAUAUACAACAUUUUGAAAAUGCUACUGCUUAAUGCCAAUAUAGCUCUUA | |
| | CUCUAAUUUGAGAGAAAUAGCUUAUUCCAUUUUGUUUGAUCCCUCCUCCU | |
| | UUGUCUUAUUCUGCACCAAGGCGAUCAGUUAUUUAUUCAUUCAAUGAAUA | |
| | UUUGUUUAAAUACCUACUAUGUAGCAAACAGUAUUUGGGGAGCUGAGAUU | |
| | ACAGGAUCGAACAAACAAAGCUCUGUUCCUUAUGAAAGUUAAAUUUCAGG | |
| | AGGAGUAAACAGAUGAUAACAAAGUCGUUAAGUAAUAUCGACUAUGAUAA | |
| | ACAAGUAAUUAAUAUUAUACGCUGACAAGUACUAUGGAGAAAAAUGAAUC | |
| | AGAAUAGGGGAGGUCGGUAGGUUUAAACAGGGUGAUUAUGGGGGACUUCA | |
| | UGAAGCAAGCGAUAUUUGGGCAGAUGCUGAAGGAGAUGAGGGAACAAACC | |
| | AUGCAGAUAUACUGGGAAAAAGGAAACUUGAACAACAUUUUCUGUGAACA | |
| | AAAAGGAGGCCAGUGUGGCUGAAGAAGAACUAGGGGGAGAGUUGAAGAAG | |
| | ACGAAAUAAGAGAAGUACUGCAGUUGGAGAUGGGGAAACCUCAUGUAGGG | |
| | ACCUCAAGGCCACUGUGUAGACUUUGCUUUUACUCUAGGUGAUGAGGUGU | |
| | CAUUGGAGGGCUUUGAGUAAGCAAUUCUUUCUUGAAUGGGACCAUCUCUA | |
| | AGAAACAUGAAACCAUGCUCAAGCAUCUAGGAUACAAGCCUCCCACCUAG | |
| | GAUUCAGGUGACUCUAUCAGGUAGUAUGGGCUAAAACUGAUCUUUCUGAA | |
| | GCACCAUUUUCCUAAAGAUGAGUAAUUAAAUAGCAUCAUAUGGAUAAAAG | |
| | UGAGGUAUUCACAUCAUCUUAUAAAGAUAUCAUGCUAGAUAACUUCAGAC | |
| | UCAAGGAUGUUAAGUAUAUGUGAAGAUGAACUUCUAGCAAUAUGACUGGA | |
| | UCACCGUGGGAGCAUGAAUUCCGUCUUCUGUCCCAUAAGGUAUCCUCUGU | |
| | UAUAAAAAGCUUGGAUAGCAUUGGUGAAGUAUAAUAAAAUGGACACUAUA | |
| | GUUAGAGUGGAAAGACCUGGUUUUGAGUAUUGGAUCAACUGCUUAAAAGC | |
| | UAUGCAAUUUUAUUUUUUGAUUUAUUUAUUUUUUUUUGAGAUGGAGUCUC | |
| | ACUGUUGUCUGCCUGGGCUGGAGUGCAAUGGCACAAUCUCUGCUCACCAC | |
| | AACCUCCACUUCCUGGGUUCCAGUAAUUCUCCUGCCUCAGCCUCCCAAGU | |
| | AGCUGGGAUUACAGGCAUGCGCUGCCACGCCCAGCUAAUUUUUGUAUUUU | |
| | UUAGUAGAGGCGGGGUUUCACCAUGUUGGCCAGGCUAGUCCUGAACCCCC | |
| | CACAUCAGGUGAUCCGCCCGCAUUGGCCUCCCAAAGUGCUGGAAUUACAG | |
| | GUGUGAGCAACUGUACCCGGACUUGCGUCUUGAUAUUCUUAUCUGAAAAU | |
| | GGGUAUAAUAAUUUACAAAUAAUGUACAUUUGGUCUACAAAUAUUUAUUG | |
| | ACUGUCUACUCUGUGCCAUAGUCUAUCCCAAAUUCCAGAAAUACAGUAUU | |
| | GAACAAGACUCAGCCCAGCCCAAAAGGAUUUUAUAUUUCAAACAGGGAAU | |
| | UUCAACAGUAUUUGUCUGAUAUAUUUAUGAGGAUCAAAUAAAGUAAUAUA | |
| | UUAGAAAUGCUUACUGCCAUAUAUGGCACUCAGUAGGAAUGCAAAAAAUG | |
| | UAAGUUACAUCUCUAUAAUUCUUUUAAAGAGUUGCCAGUUAAUUUUCUAA | |
| | GAGAGCUAGAUAACCAUUUUUAUUCAGUUGAAUAUUAUCUUCUUUUCAAU | |
| | CAUGUUAGAAUAAUUCUCUAGCUUCGUUUUUUAAAACAAAAUAUAAAAAU | |
| | UGGGAGAAGUUGCAAUUUGGGGGUUGCUGUAGUUAUAUAUAACAGUAUAU | |
| | UUACUGUUAUAUACUGUUGUAUAACAGCAUACACUGCUGGAAGAGGUAUG | |
| | UUAGUUCAUUGGUGCUCUGUUACCUUGUCUUUGACUGAAGGAAGGGAUCU | |
| | UGUAUAGCUUUACUUGAAUAGAGUCUAAUGGUUGUGUGUUGUUUUAGAAA | |
| | AAAGGAACCAGCUAGUGAAAUAAAUAAAGACAUGAUCAAUAAUAAUUCAA | |
| | UUUUAUUAAUAUUGAUAGUCUUAAAUCUGUUCCUCUUUUAAAGAUUUUUU | |
| | UUUAAAAGCUUCUGGAUUGUCUUUUUAAAAAAAGCUUCUUAAUUCAUUGU | |
| | CUUCUCAAAUAUCCAGCUUUGUAUUUACAAUAAGUGGGAACCAUGUUAUU | |
| | UUGAGUGCCAUGUUGUGCUAGGUAUAAUAUUAUUGUAUACAAACUGCAGU | |
| | UUUGUCCAUUUAAAAUACUUUUGUUUUAUAAUAGUUGAAAAGUAGUUACU | |
| | CGUAGAAAAUUUAUUCCAGGUCAACUUUUAAAGUUUGAAGGAUAUUGAAU | |
| | AUAAAAAGUAUGUAAUUAUUUUCAUCCAAAAUAAUUGUAUUACAAAGAUG | |
| | UUGAAUUUUAAAAACAUUUUAAACCAAAGUUAUCAUAGUGUCACUAUAAA | |
| | UUUAUAAUAUUUUUGGCUGUAAUUAAUUGACCUUUCUUUUCAAUUCAAUG | |
| | AAAAUCAAAAUGUUUCCAUUUUUCCACAAUAUUUAUAAUAAGUAAUGCAU | |
| | UAUUUAAUUGUUAUUGACUAUAUAACUAUUCAAAUCCUUUAAUGAUAUUU | |
| | UAUUAUGAUAAAUUAUUGAUUCUUAUUGCUUUGACAGGAUGUGAAUAUCA | |
| | GAAAUUUCAUUAUUUAAAACUGAGACAGGCUGGGCACGGUGGCUUGCACC | |
| | UGUAAUCUCAGUACUUUGGGAGGCUGAGGCAGGCAGAUUACAUGAGGCCA | |
| | GGAGUUUGAGACCAGCCUGGCCAACAUCGUGAAACCUGUCUCUACUAAGA | |
| | AUACAAAAAAUUAGCCAGGCAUGGUGGUGGGCGCCUGUAAUCUCAGCUAC | |
| | UCAGGAGGUAGGAUCGCUUGAACCCGGAGGCAGAGGUUGCAGUGAGCCUA | |
| | GACAGAGCCACUGCACUCCAGCCUGGGUGACACAGCGAGACACUGUCUAA | |
| | AAAAUAAAAUAAAAUAAAAUGUAAUUGAGUUAUAAAAAAUAAAUAAACCU | |
| | GAGACAUACCUUUAAUUGGAUUUCUCAAAUAAUUCUCAAGUAUCUGUACA | |
| | UUGAUAAAUUAAUUGGGAAUUACUCAUUUCUCCUUCUGAGGUGCCAAGGG | |
| | CUAAGGGUUAUACAUGAACCGGAAGGUUUUCAUUUUAUUCAUUAGUUCCU | |
| | UCCUAGGCACCUGACAGGGCAAAUAGAUUCUAUUUGCCUUUUCUCCUGUU | |
| | CUCCUGGCUGUCUCUCUCAAAUAGUAUACUUUGCUGAAAUAUAGCAUAGG | |
| | AUUUAUUUUUACUGUGCUUAUGUUUACUUUUUCUUAGAUAGCAUUGGCUA | |
| | UUUCCUAUCUUGUAGGCUCAUCUUUGAUUUCAAUAUUUGGCAAAGUGUCU | |
| | CAUUUUUUUUUUUUUGGCAGUUUGGCUCUAAAAACAAACUUUCCUCCUCU | |
| | UGCCUUAAACAUUUUUUUUUUCAGAAAUAAGUAAUUCAGACUUUCAAAGA | |
| | GUCCGAUUAUCUUUUAAAUUUUAUAUUUCAAUUGGCUGUCUUUGGUAUUC | |
| | CUAUCUUUUUUCUAGAGUAGGUAGAAUUAACAGACUUUACAUAUUUUUGU | |
| | GAACAUCACAUCUUAGAAUGAUUCUCAAAAUUUCUUUACUUGGGAACUUG | |
| | GCUGUCAUAGUAGGGAAAGUGAAAAAAGUAAUGUGGAAUCCCACGUGAUG | |
| | GCACAUAAUUUGGCAAUAAUAAUUGGAAAGUAAUUAUAAUUGCACUAUUG | |
| | UACUGCUUUAGGUAAGUUUAUGUCAACAUUUCUUUAUCUAAACUCCAGUU | |
| | CACAUAUAGCUAUAUCUGGGUUGUGAAAUUUGCUGUAAUAUUUUUAGAAA | |
| | GAAAUUCCUAAAAUGCUUACUAUAUUUUGGCAGUUUUGAAAAGUAAAUAU | |
| | GAGAAGUAUCUUUUGUAACUUCAAAUUGCUGGGGUUUUUUUUGCCAAUAC | |
| | AUCACUAUGAAUAAUGGCAAAAUCACAUAUUUUCAUGUCCCAGUUUUAAA | |
| | UCAUAUUAUUGCUGGAGGAAAGUCCCAGCUUUGUUUUCAUAAUUCAGCAA | |
| | AUAAUAGGUAGCUUAUAGCCAUAUUUUCUCCUGUGACAUUACUAAUAGUU | |
| | UGUCUUCUCAAAUAGGGCAGUUAAAAUAUCUUUAGAUAUUAAAACAUGCA | |
| | UUAGAGCCUACUUGAACAAAAUUACAAUUUUGUAAUUGAAUUAAAGAUCA | |
| | UUCCAUUGGGAAUCAAAAAACCUGGGUUUUAGUUUUAGCUCUAACAUCAG | |
| | CAGCUAAUAUGAUUUUAGGUAAGUUGCUUAAAUUCUCUAGCUCUGUUACC | |
| | UUGUCUUUGGAAUGAGAAGCUGAACAAGGUGAUUACUAGGAUUCAGUGCA | |
| | AAUCUAAAAUUCUAUAACUGUGCUUUUGUUCAUAAUAUAUUUUAGUUAAU | |
| | UAUUGAAAUGUUCUGCUUUCCAGAGUAGUACCGUAAACCAGUAAUUUAAA | |
| | CCCUUCCUACUAUGUUUCAACCACUUUCCCAAGGGCUGGUAUGGGUCUUA | |
| | CUUGCUCCUACAUGUAGGAGUUAGUCUGCUCUUAUUUAGUCCUUUAGAUA | |
| | UUUAGCACAUUUUAGCCUGAAUAUCUGACACAGAUGAAUGAUUUUUUUUU | |
| | UUUUUUGAGACAAAGGCACACUGUCACCAAGGCUGGAGUGCAGUGGCGUG | |
| | AUCUUGGCUCACUGCAACCUCCACCUGCUUGGUUCAAGUGAUUCUCGUGC | |
| | CUCAUCCUCCUGAGUAGCUGGGAUUACAGGUGUGUGCCGUCAAGCCUGGG | |
| | UAAUUUUUGUAUUUUUUUAAGGAGAGACGAGGUUUCCCCAUGUUGGCCAG | |
| | ACUGGUCUCAAACUCCUGGCCUCAACUGAUCCGCCUGCCUCGGCCUCCCA | |
| | AAGUGUUGGGAUUACAGGCAUGAGCCACCACGCUCAGCCCAAAUGAUUUU | |
| | AUAAGCGUAGAAGACAUCUCUCACAUCUUAGUGGGAGAAUUAAAUGUCUC | |
| | UCUUUUUCACUGAAGUCUUACCGAGAAUCAUUUCUUUUCUGUCACUCUUG | |
| | CUGAUCUUGCUGAUGAGCCCUAGUUCUGCUUUGUCAAACUUAUUUGAGAU | |
| | CAGGCUGGCCCUUGUGACAAUCAUUGCCGGUAUAGACUUUUCAUAACAUC | |
| | CAGAAACUUCAAGCACCACUAUAUUGUUUCUACUUCCUCAUAUGCCUUUU | |
| | AAAGUAUAGAAGCUGUAUUCCAAUAUAUAUCUACAUGUUAGGUUACAGUG | |
| | AUCUGCUUUUGGACUUGAGGCAUUUUUUGGACUCGCCUGUCCGUAAGUCU | |
| | CACUUGCAUUCUUUGUGAACAAAGAAUACACCCACUCUCAAAUGUAUAUG | |
| | CCCACACACAAGCAUACAGUAUCUUGUACACCUAUCUGCACACACACAAA | |
| | CACAUGCAUAGUGCUUGACUUUGGACUCUGUGCUUUAACUGAGAGUAUUC | |
| | AUUUUUCCUGGUUGUUACCUUCAUUCCAGUUUUGUGAGCUUUGCUGUCAA | |
| | AGUGGCUGUGCAUCUAGCAUAGAGUGGCUGCUGUUGGCAACCCAUGAACA | |
| | AUGAGCUUAAACAGAAGAAUGAGGGUAAUGUUUAUUGUAAUAAAGAUUGG | |
| | GCAUUAAAUUCCUUGGGGGAAUGAACCAAAUCCAAUGUUUUCCUGUUCGC | |
| | UGACAUUUUUUAUAUUGAUGCUGUUUUGGAUCUUCUGGAGAAGGGAGGAA | |
| | AAAAAAACUUCAGCAAAUCAGCUCUUUCAUUCAAAAAUGGAAUUCAGAAG | |
| | GCUAUUUUAGCUAGCUUUUUUUGACAAUCCUGGAUUUAAUCAGUUUUUAC | |
| | UGUGAUGAAGACAGUUAGCCUCACAAAUUUUGUGGAAAUCUAAAGCGAUG | |
| | AAGGGUGUUGUUAAGGGGGAAACAGAGUGCAAUUGUUUAAAUAAUCCUGG | |
| | GCCAAUAGCAUUUGGUAGGUGGAGUUACUGUUGUGUGCAUUACAGAGCAA | |
| | GAUAAUUCUGAAUGAAGACUUUAAACAUUACACAUGCUGGACGGAUUCUG | |
| | GGUCUGCUCUUUGUGCAAACAAAACAAGUGACUAGGUUUUGCUUACUAUC | |
| | CAUUAGUGAAUGCAGCUUGUUUAAUAAGAUUUUUUUUAAAAAAAUGCAUG | |
| | UAAAGGAUUUAUCAAAAGCCUUUAUGAAUAUUUCAUGAGUUGAUAUAUUC | |
| | AGCUGAAUGAAUUCAGUGAGUGUCAGUGUGUAGCUUGCAGACAAACCUCA | |
| | UCCACAAGGAGGCUACUGACAUUGGAAGCACUUUGGCGCAUUUUCAGAGG | |
| | CAAAGCCAGCCUGAUAAAGCUCCUUGUGACAGCCUGACUUGCUAUUCUUC | |
| | GAGUAUGCUGCUCUUGCUCUAAGACGCUCAUACAUUGGAGUCACAGCUUC | |
| | GUAAAUUAAACUGGAAAUAGUUUGCAGACUUAUCAGUCUUCUGACCUGCA | |
| | GCAGUGUCUCUGCUAUGUUUGAGAUUUUUGUUUUGGAUGGUGAAAGCUAG | |
| | CACUCCUUACAAGACAUGACAGCAAAAGAUUCUUCAAAGGAACUUACUGC | |
| | UUCUGAACCUGAGGUUUGCAUAAAGACUUUCAAGGAGCAAAUGCAUUUAG | |
| | AACUUGAGCUUCCGAGAUUACCAGGAAACAGACCUACAUCUCCUAAAAUU | |
| | UCUCCACGCAGUUCACCAAGGAACUCACCAUGCUUUUUCAGAAAGUUGCU | |
| | GGUGAAUAAAAGCAUUCGGCAGCGUCGUCGCUUCACUGUGGCUCAUACAU | |
| | GGUAAGAUAAGACUUGGAGGUAUCUACAGUGCUUUUCAGAUUCUCGCAUU | |
| | AGCACCAGUGAUCUAGCAGUGUAGAAAAUGGAACAUUUGAGUUUUGUUCC | |
| | UAAAACAUACUGCAAGUGUGAAAUGAAUGGAGACCAGGUCAGAUGAAGAG | |
| | UACAUAAAUGCACUGUGUGCUAAAUUGUCAUUGUGCUACUAGCUUUUUCC | |
| | AGAUAAAAUAUGCUUUUAACUGUAGAGUCUUUAAAAUUACUGCUUAUCAG | |
| | AAUACAUAGCUAAUUCUAGGUAAGUCGAGUAAUAAAUGAAUUUUUAAAGU | |
| | CAGUUUUUUGUUUCAUAUCUGUUGAGGUGGUAGGUGACUUUUUUGUUUUG | |
| | UGAUUGUUAGUGAUUUUAAAAAAAUAAUUUUGGGACAUGAAUAAGUGUUU | |
| | UAAUCUUAGUUCUAACUUAUUUUUAAGAUAAUGUAUAAAGUCUAACUUAA | |
| | UGUAUUGUACCAUCAUGUUUAUAGCAUAUAAACCAGUGAGUUUUUGAUUU | |
| | AUUGACUUAUCUUUACAAUACUUAAGGAAAGGGAAAACUAAGUUCCCACU | |
| | UCUGAAAUUGCAUGGUCAGUUACUUUAAUUUUUGAUUCCAAAAUGCUGUU | |
| | AUCUUUAAGAGCUUCUUUUUUUAAAAAAAUGGACUUUAAAAUUUAUAGCU | |
| | AUUUUUUAAAUACCCAGCAAAUAAAUUCAAGAACCCUCUGUAAAACUUGC | |
| | ACUGAGCCUGCCACCUUUAAUAUACAUGUUUACAAGGUAUGUAAAUAUAG | |
| | UAGGGUAACGUCCUUAAACAGUAUAAUGAUGAAAUGUAAGGAAAAAACAC | |
| | GAUGAAAUUAAAUCACUUUUACUGUGAAAGCCAGGCCACUUCAGAUUUUU | |
| | UUGGAGGCUAUAUUUUCUUUCAGAUUAAGGUACCUUUAAAAAUUGAGUAG | |
| | CUGUACCUUAGUUUUUUCUAGCAGGGACCAUAGCAAUAUAGGGAGCAUGU | |
| | ACAUUUUAAAGGCAAUUCUAACACAGUGAUUUUGUGACUACAUGCUGGGU | |
| | UGCCAAUCAACAUUAUAAAUUGAGGAGAUCUGAUUUUUAAAAAUUAAUAU | |
| | UCACUUGAAUUAUUUUCUACUUAUCUAAAAUGUUUGUCUGCUUAAUCUAC | |
| | UGUAUAGUGCAUUGGCAAAUUAAAGUUACGCCUAGAAAUAUAUAGCUUGC | |
| | CUUUGAUAGAUACCACAUGCUUAGCCAACACAUACUUUGCCUGGCAUAUA | |
| | UGAUGUGCUUAUUCUUGCUUUCUGACAAUGGACUGUUCAUAUAAUGGCUU | |
| | UAUUGCAGAUUUUCUUUGGUCAUCUUCUUGAUGUAUUACAUCAUGUUGUU | |
| | UAAUUGUAAUCUCUUAUUUGCAGAAUACACGUGGUUAGUCUUUCAAAGCC | |
| | UACUAAUGAUGGUAACAUUGUAUAAAGGGAAGGUUUAUGUAUAAGGAUGU | |
| | ACUGACUUGAAGAAGUCCUCUCUUUUGUGCUUUAUCCCACCCCUAACAUG | |
| | UAUGUAUUUUCUUAUAGUUUGCUGAGUAGUAUAACUGAAUAGGGAAGAUA | |
| | UUAGUUAUGAAAAUAAUAUAUACAGAAAAUACACAAUUAAUAGAUGCACA | |
| | UUUUUUCUUGAGUUAAUAUUAAAUUGCUAUUUUAACCAAAAGGAUAUUUA | |
| | AUUUUAGAUAGCUAAUUUUUAGAUAAUGAUAAGUCUUCUUAAACCCUUGG | |
| | UAAUAUUUUUCUUUAUGUAGAGUUUUGGUUCUGAACACAAUAGUGUGACC | |
| | UUUCUUUUUCUUAUAAUAGAUUUUUGAUGUGCUAAGAACAUAGAGCUAUA | |
| | AAUACUGGAGUUUUUUACUUUUCCAAAGAACCCCAAUUUUAAAAUGAUUA | |
| | AAGAGCUAGUUUUACUCAUGCAUUAUACAAAUUUUCUGGCAGCAAAAGGA | |
| | ACAAUUAAAUGGUAUCUGAAGUUACCUACGCUAAUAAGAUGAUAUUCUUU | |
| | UAGUUGAGUUAAAACAAAAUGUUACAAUUGCCAAAAAAAAUAGGACUUUG | |
| | AUAUAAUGCUCUAUAAUAUAGAUUAAAAUAAUUCAUUAAUCAUUAAACUU | |
| | GUGAAAUAACUUUAGUUUUGACUAUGAUUCAUUUUCACCCUUUUUUCUUU | |
| | CAACUCACACAUUCCCCUUCUGAUGUUUCUUAGUAAAACAGUUUCACAGU | |
| | UUGUUUUCAGCUCAUGACUAAGUCUUUAUUUAUAUUUAUUUCUAUUGUUU | |
| | UAUCUGAAUACAUGCUUAACAUUUUUCAAAUUUAUUUUCAUACAACAUGC | |
| | AAUGAAAAUCUCUUUCUAGAAAAUAGACAUGUAUCUUACAUAUUUUUAUG | |
| | ACUUUUUCAAAUCUUAAAAAUUUUGCCUUUCCCGGGGAACCCCGAUAAAG | |
| | UCUCUAGCCUAAUGCUUCAUGCUUUCCCCUUGCUUCGCCUUUUUGUCUCU | |
| | UGAGCACCCUAACGUCUUUCCAAUGAAUAUAGAUGGCUCUGUAUGGUCUG | |
| | CUCUACCUCCUGUCUCUAAGACUCGUGAGAAUAAUAAACUUUUCUUUCUU | |
| | GAGUUUCCAAAAAAUUUCAUGUGCUUUUUUACAUAGAUGAAAUGGUUAUA | |
| | UGAGGAAAUAAGAGCAUAAGUACUUUAUUUUUGCCUCUUUGUCAUAGUGA | |
| | AAUGUAACCAGCCUUUCACGAUCAACAAUUGGUAUUUUUCCAAACCAUGC | |
| | ACUUAAGUUAGAAAUUCCAAGAUAUGCACUUAGAAGUCUCUAAAAACAUG | |
| | UUAUUACUUUACAGUAGACAGUAGGCUUCUUUUAAGAAGAUUGGAUUGUU | |
| | UUGAUUCCAGCAUUGAAAUUAAAGUAAUUUUCAUGAUGAAGCUAAACAAU | |
| | GCAGAGGAUGCAGUUUAUAUGCAAACCCACUAAACAGUUUUUAUUUGUAG | |
| | AUUUCAUAUUUCAGUCAGAUGGAUGUGUAGUUCUGGCUUUAAAAACCCAA | |
| | AUUAUGAACUGUGGACUAAUGGCAGAAGAUUUAAGAAAUAUUUAUGAAAU | |
| | UCUGACUCUGGGCUAUUUAAAAAUAUCUGGGGGAAAUGUGGAUAUUCAAU | |
| | GUGUUAUCACUAAUCAGAGUAUUUACAAAAUCCUAAAUCUGGAAGGAAUU | |
| | UGGAUGAUUAUCUCAUUGCUUCCUUUUACCCUUGGGCAGGACCACAAUUA | |
| | CUCCAUCUUUAACAUAUGGGAAUCUGCCCUACUUUUAAGACUCUAGAGAA | |
| | AAUAAUUCUAAAAUCUCACUUAGUAUACAAUCUUACUACUUUAUAGUCCA | |
| | GGUACUAGAAAAUUAUUUGUUAUGAUUUAUCUAUAUUAUUUAUAUAUUAU | |
| | AUAUAAUCUUUUUUCCCCUCAGUGGAUAUUAUUAAUAAAAAAGAUGCGUA | |
| | AGAGCCUGCAUGAAUCUGAAGAUCAUUAUUAACUGGUGCCAGCGUUUUCU | |
| | UUUUCAUUCACUCAACAUAUGUAAUUGAGCACUGCUGUGAGCAAGAAGAG | |
| | AAAAAAAAUCUGAUUCAACCCACAUGUAUUCCAACACCUACUAUAUUUUA | |
| | AGUUUUUUACUAGAAUGUCUGCAUAUGUUAUCCCAUUUAAGUUUCAUUUG | |
| | GAAUAUAAGUAUACUCCAAAUUCAUGAUCCUUUCAAUAUUACCUGCUGCA | |
| | GAUAUCAAAAGUAUUUUGAAUUGCUCUAGCUUCUUAUAGGUGUUUAUACU | |
| | CCAUUCAUCAUUAUUUUGACUCUGAAUCACUAUCUCAAAUUUCAAAAUUU | |
| | UUCUUUGAAUUUUGAAACCCAAAAGUGGAUACCAUACUCUUUGUUAGACG | |
| | AUAUGAGAAAAUAUAGAUAUGAAACAUGUAAUAAGUUGCAAAGUGUCAAU | |
| | GGAACCUUCAGAAUUACUGAAUUGGAAAAUUACUGCCAGAGUUCUCAGGU | |
| | CAGCAUAGUAUUUAUCCCCAAUCCCACAUCAGGGAUGACAACUUAUGAAG | |
| | CACAGUGUUAUCCUACUUGGCCUGUAUGGCCUGCCUGUGCUUGCCUGGUA | |
| | CUUGUCACACAGUGUCCAGCUUUUAUAACCUUCCCUUCUUUGUUGAUAUC | |
| | CCAACUUCAGUCGUCAGUUCUCUUUCAUCAUUAGCAACUUGAUGCUCUCU | |
| | GAAGAAAGCUACUGCAAUGGUCUUGAAUAUAUCCUGGGCCCACUGCACCC | |
| | CCCUGACCCACCCCCGCCCCCCACCCUGCUGCAUUGCUGCUCCUUUUUGG | |
| | AGCUCUCUUCUUGUAUUUGUGAGGACUACCCUCUAUCUCUCUGUCCAUGC | |
| | UUGCACACAGGAAACAAUAUUUUUGUAAUUAGAAGUUAGUAGGAGAAAAG | |
| | AGGCUUGUAUUCCUUCUUCUCGUUUAGUUUUACCUGUAUCUUGGAAAUCU | |
| | UUUCUCGUUUUAACAAAGGUUUAUGAAGUCUUUACUUGUCUAUCUAAUAU | |
| | UUGAAUACAAAAGUUUUAAAAGCCAUAGUUAGUACUCUAAAGGGACUUAU | |
| | AUUUGGCAAGACAACACUGGAUUAAGUGGAGAAUAGGAAAAAAAACAGUG | |
| | AAUAUGGCAUAUGAUUGACCUUAGAACUGCCGACAUGCUUGCUGUAUUAU | |
| | ACAACUUAGUCCUAGUUUGUUAGCUAACUCUACUGAAUCUGUGCUAGUAA | |
| | UAUUGAUCAAUUGCCUUGAAUUCUAUCCUGGUAAUAUUGGAAAUUUUUUG | |
| | AGAGAUGUCUGUCUUUACAUGUUUAUUGAUUCAACAUUUGUUUGAACAAA | |
| | ACAGUUGUUAAGAGCCUACUAUGCACCAGGCUCUGAUCUGGGCUUAGGAG | |
| | ACACAAAAUGAGAAAAAGCCCUUGUCUUCAAAGAACUCCUAUACUAGCUG | |
| | GAAGACAAACUUAUGCAAUAAUAAUUAACCAAUGGUGUGGGAAUAAUGCU | |
| | ACUGAAGCAUGUUGUUCAACUUGUCAUGAGGGCACAGAAGAAAUAACUAC | |
| | CACUAGAGAGUGAGUCAAUGUGUUAAGGGAAGUUUCGAGAAGAGAUGACA | |
| | UUUGUGUGGGGUUGUGACAAAUGAAUAGGAGUUUUCUAGGAGAAAAGUGG | |
| | GCAGGAAAGGUAUUUUUUGGCCAAGGGAGCAAUAAUUAGGAAAUCCUGUU | |
| | AACAAAUAAUAACAAUAAUAGCUCUAAUAUAUUCAGCACUUAUAUAAUGU | |
| | GUUGGAUAUUAAUUAUAAAUGUAUUUACUCAUUUAAGCAUAUAAAACCCC | |
| | CUGAGUUAUAUACUAUUAUAUUAUUUUCAUUUUAUAGGAAAAGGAAUAAA | |
| | GGUCAGACAGGACAAGUAAUUUGUUCAAGUUUACACAGAAAAUAAACAGC | |
| | UGAGUUGGGAUUUGACUCUGAGCACGAGUGAAAAUACACAUAGUUCACUG | |
| | GGGUUUCAGCCUAAGGAUGCAAGGUGGGAAAGCUAGGAAGUAAGACUGUG | |
| | CCAGCAGAUUGGAGCCAUUUGCUAGGGCUUCCAAUAUCAUGAACAAGAGU | |
| | UGGAGUUUUAGCCCAUCCAUUCUCGGUGAGGAGCCACGACAGGUUAUGAG | |
| | AAGGGGAUUGCCAUGUAUUAUUUUUAUUUUGGAAAGGUACUUUGCAGGUC | |
| | AGGUAGAGAAUGGAUUAGAGGACAAGGAGCUUAAAGGUAACUGGAAAAGG | |
| | GACAAUGUGCAUUUGAGAGAUAAUGACUUCUACUUAUUUUGUAUAUCCCG | |
| | UAACAUUGAAAACUAUGCAUAUGACAUGUUUUAUGACUUAACAAAUUAUG | |
| | GUUUAUGGAAACUGGGAGGAAAGCAUGUGAACUUGGUGUCUCUUGCAUUU | |
| | AUCACUUACACCAUGAUGCUGUAGAUAGUACUAGCUGGUACAAUACCCCC | |
| | ACAUGCAUCAAACAAUCAGCAAAGGUGCAUAGGAGGAUGUGUGUAUCUGA | |
| | GGAAAACCCUAUUAGCUCAGUCCUAAUUUACUAGAGGUGCUUUGUAUUUU | |
| | ACUUUAAGUGCAGACUCCUAGUGGGUUAAAAAAAAAAAAAAAGCAGAUAU | |
| | UAUCUUAGUCCACAAUCUGAAUCAAAUGGCAGUAGAAAUCUAUGCCUCAU | |
| | AGCCUGAGUCUGUUGCUUUAAUCAGAGCAAGCAUUUUAUCAGUACAUCUA | |
| | UAAAUAGUGUUUUCCUGGCCUUUUAGUGUCAUCAAGUCUUCAAUAUAUUG | |
| | GAUUUUUAAAAUACUUACAGUAAAAAGGGCUUUGCAAAGUAAUGGUGACA | |
| | ACCCCCAGGACACAUGCCGGAAGGUGGCCCAGCAAGCUUGCCAGCUGCCU | |
| | UUCUGCUAAAGGCUAAACCCAUUUUGCUAAAUCCCACUUGCGUUCUCUUU | |
| | CCAUUCCUUUCUGUUUUGUUAUCUCUCAGUUUUUCUCCUUGGAUGUUUAU | |
| | AGUGCUUCCUUCUCUAACAUCACUGUCAAUGCACUUGCAACAUUAUGCUA | |
| | GAAGCAUUUAAGCGAUUUCUUAGAAAAAAAUCUCAAACGCUUACCAUGGU | |
| | UUUCAGGCCCUACAUUAUCUGGCCCCAGGCUGCUUCCAACCUCCUCUCCU | |
| | GUUCUCCAGCCCUGUGAGCCUGCUUUCUGUUGUUCAGCAAACUAAGCCUG | |
| | UAUUCACUUCUGGCCUUUGCACUUGGUUUUCUUCUGCCUGGAAGAAAAGU | |
| | ACCUGGAUGUUAACACGGUUUCUCCUUAUGUCCAUUCAGGAUUCUACUAU | |
| | CUCCAGGUAUCACUAUCCGGAGAGGCCUUUGCUGACCUCCCUAUCUAAAA | |
| | UAGCACCCUUUCGCCUUUUACUUCCUUGUCUUUUUGGUACUUAUUAUUAC | |
| | CUGAAAAUACAUUAUAGACAUGCUUAUUUGUUAUAUUGUCUUAUCCUUUC | |
| | AUCAUCUGCCAUCCCUGCUAAAUUUCAUGAGGGCAGUGAUUCUGUCUUGU | |
| | UUUCAGUAUCCUCAGAGCAUACAAGAAAGGCAGUCAUUUAACAAAUACUU | |
| | GUUGAAGAAAUAAAGAAUGAAUAUGGUUUCUGUUUCCUGCUCUUUAUUCU | |
| | AUGAGCAUUUUUCCUAUAGCUUGAUAUGAUGGAAAUGGAAAGGAAGCUUU | |
| | GUUGAUACUUACUCUAUAAGCAUUCUUCUCCAAUCAUCUCUCAAUAGCUG | |
| | UGCUCUCUUUCUGUCAGUAGAGCUACUGCAGCUUGCUUCCUAUAUUGUAU | |
| | UCUAUGAUAUUGCAGGUAUAGAUUUAAUUAUAAUAUCUCACUAGAGCCUA | |
| | AAUGCUUUACAUAGUAGCCUAUUUAAUUAAGUCACCAUGUACAAAUCAUA | |
| | CCUCCUAGUCUGUAGUGCUGUAAAGUAAAUAUUUGUCUGUAGCACUGUAC | |
| | AAUUAUUUAUUUGGUUUUUCUUCAUUCAUCAAGUAGCAUGGUUGGUGCAU | |
| | CAGCUCAGGAAAGCUCUACAUAUCUCUCACCAAAUGCCUGAGGAGAAGUG | |
| | UUGUAUGGGGGAAUCUACUUGUUAUUUUGCCUUCAAAAUAUUUACAUAGU | |
| | GUACAUUAGAAUGCUUAAUUAUCUAUAUUUUUCCACUGAUGCAACAUUUA | |
| | CAAUAUUAACUCUAGCAGCAGCUACAGCAAUUUGAGCUUUUAAUAGGAUU | |
| | UCCCCAGGGAACUUGGAAGUAAGAAGUCUAUGACUUGCAGAGUGAGGAAA | |
| | UUGCAAGUUAAUAACCCUUGUACUCUAGAAAAGACGUCACUGAGAGGGAA | |
| | ACUGUUCACUUGGUUCUGCCUCAUUUUUUCUUUCCUGAACUAGGAGGUUG | |
| | GGGACCUCUGUCACUGGUAGUAAUUUGUUUGACAUAAAUAUGUUUGAAUA | |
| | CCACUGUGUACUUUAGGUUGAAAUGAAAAAUAACUCAACUUCUCAGGUUG | |
| | CUUCUUCCUGGAACUUAGGGAGAAUGAGGAUGACUGCUUCUCAAAACCUU | |
| | UGUAAAGAGAAUGCCUAUGAGAUGAUGUGCUCCCUUGACAGACCAAGGCU | |
| | UGUCCUCCUCUUCCAAACUAUACCUCUCAAAACUCAGCUUUAUUGCAAAC | |
| | UAUGCAGAUUGGAAGUCAGGGGAUGGAGGAUAGUGUAGCUUCAAAGAGUG | |
| | CUUCUUUCAAACUGUAUUUUCUGGAAAAUCAGUGAUCUAGGAGCCAUUUG | |
| | GAGAUUCCUCGAAAAAGAGGGUGGUGAUGAUCUGUUUCCUGGUUCUCGGU | |
| | CAGAACAAAGCAACAUGGAUGAUUAUAUGCUUGGAGAAUUUUGGAGGAUU | |
| | CUCACACAAAUUCUAUAAUCUCCAAGUACUUGAAAACCACCAGUUUAAGA | |
| | GUUAAAUGAGUAGAGGGAGAAAAGAAAUCUGUUUAGUUGUGCUUGAUAAA | |
| | GUCACAGACAUUUCCAGAUAAUUUAUAAUAUUAAAAUCAUCUUCAUCUAA | |
| | UAUGUCCAGGAAUGGCAGCAGGAUAAAUGAGGAGGAUGAAAGCAACUGUG | |
| | GGUCAGGGAGACAUCACUGGUAGUGAACAUUUAAAAUUUCAAAGUUGAAA | |
| | GAAUAGUACAAUGAACACCUUUUACCUAGAUAUACUAAUUGUUAGUGGUU | |
| | UCUCUUAUUUACCUCUUUGUCUCUUUCUGUGUAUAAAAUCAUAUAUAUGU | |
| | UUUCUUUAUGUUGAAGAGAGCACAUUUCGAUGGAGAGCAAUAGUUUUGGG | |
| | AUCAAAAGAAAAAUAUUAUUUAUUUUAAAACAGUUUCCAUGUAUCAAGCU | |
| | UGCUGUUAUUACAAUUCAUCCGUGUUUUUGCAUUUAUUAGUAAUUUAUUC | |
| | CCUUUUAUUAUUAGGUGGUAUUCCUUUGUAUUGGGUGUACUACAACUUGU | |
| | UUAUCUGUUCACCAACUGGAUCAAAAUUUGGAUUUCCAGUCUUUUGGCUA | |
| | UUAUGAAUAAAGGUGAUAUAAACAUUCAUGUAUGGUUUUCUGGGUAAACA | |
| | UAUAUUCUAAUCUUUCUUGGGUAAAUAUCUUAGAGUGGCAUUGAUGGGUU | |
| | GUAUUGUGAAGUAUAUGCUUUUUUGGUUGUUAUUUGUUUUUAUUUUUUUG | |
| | ACAUGGAAUCUUGCUCUGUCACCCAGGCUGGAGUGCAGUGGCAUGAUCUU | |
| | GGCUUACUGCAACCUCUGCCUCAUGGGUUCAAACUAGUCUUGUGCCUCAG | |
| | CCUCCUGAGUAGCUGGGACUACAGGCACGUGCCACCACACCCAGCUCAUU | |
| | UUUGUAUUUUUUGUAGAGAUAGGUUUUCACCAUGUUGCCCAGGCUGGUCU | |
| | AGACCUCCUGGGCUCAAGCAAUCUGCCUGCCUCAACCUCCCAAAAUGCUG | |
| | UGAUUACAGGCAUGAGCCACCGUGCCUGGCCUAUAGUAUAUGCUUUACUU | |
| | UAUAAAACACUGCCAAACUGUUUUCCAUCAUGGAUGUCCCACUUUAUAGU | |
| | CUUACUAGCUAUAUAUGAGAGUUCUUAUUAUUCUGUAUGUGUGAGGGCAU | |
| | UUUGUAUUGUCAAGUUUUUUUUAAAUUUUCGUCAUUCUAACAGAUAAGUA | |
| | GUGGUAACUUACUGUGAUUUUAAUUUGUGUUUCCCUUAUGACUAGUAAUA | |
| | CCGAACAUCUUUUAAUGUCUUUAUUUGCUAUCCUUAUCUCUUUGGUAAAA | |
| | UAAAAUUGUUUAUAUAAGUCAUGUAUCAAUAAACUUUGCAAAUAUUUUAA | |
| | UUUUUAAGAGCACACUGACAUAUUGGCAAGUUAUGAAUACAUUUGUAGCA | |
| | CCGGUUUAAAAAAGAAAACUAUUAAAAUAUAGUAGAGGGCUAAAGGCAUC | |
| | UAUCAUAACAUGAUUUUUCUUGCUGAUAAAUUAUUGGUUUUCAUUUCUUA | |
| | AAAUGGUUUCUAAGAGAUGAUGUCUAUAAGAUUCAAAUUUUCUUCCUCAA | |
| | GAAGGAAGUUUUUUUAAAAAAAUAAAUCUAUAAUAAUUUUAUAAUAUAUA | |
| | UGAAACACUAUAUAAUGCCUUAAUGUAGUAUACUGUAGAACUUGGGGUUC | |
| | UAUCACUGUAUAAUUUUGACGUUGUCUGGAAUUUAUUUUUCAUGGUGAAU | |
| | CUUUGUUUUAUGUGACUUCAUCUGGAGUUGAGAAUGCUAGGUUGGGUAUC | |
| | AGUAUUUUACCUUGAUUUGCUCUUGAAACUUUAGAUCAAUCCUAGAACUA | |
| | AUUUAAUUGUCCUAGACCUCAAUUCUUUAACUGGCAAAAUGGAGAAAAGA | |
| | GUUUUAUAUUCAGAUAUUUGCAAAUGUUAAUUUAAUUUAAAAAAUAUCUA | |
| | CCUAGACUGUGAGUUACCUAUUUCUUGAGAUAAUGUAUUAAAGUACUUAG | |
| | AACAGUACUUCAAGCAUUAUAAGUUGUUUAAUAGAUGUUACUGUUUAAUU | |
| | AUCUGACUAAAUCUCUAAACAUACACAAACAUUCAUAUUAUUGUCAGGGU | |
| | UGGUUGGUAAAGCAGGAACUAGUUUUUUUUUAUUUUUUGAAAAGCAUCAG | |
| | UAUGUAUGGACUGUGCCAAUUUGGAAGAGUCAAAGUGCAUGUGGGUUAGU | |
| | AAAGAAGUACAUUUAUAAUAUCCACAGUGUGACAAUUCAGUAUACUAAGA | |
| | AACAAAGUAUCAUUCAUUUGCUGUCAUGUAAUAAUCAUAUCCUAAUGAAC | |
| | CAAGCUAAAUUAUACUAAAAUGCACUAAUUAUCAGAAGACCCAGUGUGAA | |
| | UAGCUUACAUUCCCGAUAAGAAAUUUUAUUGUCUUGUUUUGCUCUCAUCA | |
| | AUACAUUUAAAAAAAAAAAACAUUUAUCAUCUUCACUCUGUGAAAGAGAU | |
| | AGGAAGAGAACCACUUUGAAGUCAUUCCAUCCACUUGUACCAAUAAGCUU | |
| | AAAAGUAACAAGACAAAGCAAAACAUAAGAAGAUGCCUUGUCUAUUUCAG | |
| | GAUCCGCAUAUUAAAAGCCAAUAUAGGAUUCAGUGAACAAAUGCCUUGGA | |
| | AGAAUUCCAGUGUCAUCAAACUUAUUUAUCUCAAAACGUCUCCUUCCAUC | |
| | CUUUCUGAUCCUCUACAAAAUUAAUAAGCUGAGACUAUUUGUUGCAGCAC | |
| | AGAGGAUCUGAGCAUGCUUCUGUGGCUUAUUUCUGCUGUAAUUCCCUCAG | |
| | CAGUUUAUACAGGAAUUCUUUAUCUCACCAUCAGGAUUCUUUAGGCCAGA | |
| | AGAGAGGUCAGAGAAGACUGGACAAAUAAACUAUGGGAUCUAAGUCUUUC | |
| | UUGCUAAGGUCCUAACUGCCCAAGACUUCCUCCUGAGAGUCUACUGUUGA | |
| | AAUUCAUAUGCAAAUUUCAGUUUCAUGGGAUUAACCCUGGCUGUUGUCUU | |
| | UACCUGUCAGCCUGCUCAGCCAGGUGUGAGUUCACCCAUAAAACAGUGUC | |
| | UUUCACAUGCUCAUUUAUCAAAACGACAUAGAGACUUUAGGAUGCCAGGU | |
| | GAUAUGAUGCAAAAAGCACAACAUUUGGUUUCUAACUGCAUCUUUUACCA | |
| | UACACUGUUUUUGGGCAAACCAUUCAACCUAUCUUAGAAAAAGUAGAAAA | |
| | AUUAGAAAAAUUAGAAAAACUCUACUUGUAUUUCAUUAGGCCUUUAUGAA | |
| | GAUUAAAUGAAGUAAUGUGUGUAUGAUGGUUAGUAUAAUCCCUGGCCAAU | |
| | GGCAGGUAAUAAAAGCAGUCCUUAGUUCACUAAUGUAUCGAGAGCUUAUG | |
| | AUUUUGUGUAAAAUUUAUAUAAUAUGUAUCAUAAUGUAAACUACUUAAAG | |
| | AUCUUUAUAACAUGGUUUAAUUAAAUCAGUUUCAUUGAGCAAAUGUGGUG | |
| | CAUCUUAAAUCCAUUCUUUUAGACCACUUAGAUAUUACUUAGUUUCAUAG | |
| | GAUAUGACUUUAUCAUAAAGCACAUAUUAAUUAUCCUUACCACAAUAAAA | |
| | UAAAAAGUAAUAAAUCCUUAUGUGUUAUGGUGUGUAAUCACUCUCAUUCA | |
| | UCACAGAGACCAUUCCAAAUUGCAGAUUUUGACCAUAGAAUAAUCUUUUU | |
| | UCUUUAAAAUUCCAGUUACCUUCUUGAAUUUGAUACUUUCUCCAUUAGUG | |
| | AAACUAUUAAUAGAUACCAAUGAAGCACUGUUUUUUUUAAGUUAACGUAA | |
| | AAAACAUUUAAUGGUCUUUUCAAAGUGCCAGAACAUCUCUGAAGUUGUUU | |
| | UCCUUAGUGGGAUCUAACCUCCUAGUGACUUGUUUAUAUCAGAAAGUUUA | |
| | UUCAUGAGAGGCAGUGGAAAAGCACCUAGGGAUCUAGAUUGACAGAAUCU | |
| | AGACAUGUUUCCUGGCACCACCACUUACAAACUGUUUAUUUAUUUGUUUA | |
| | UUUAUUUAUUUAUUUUUUGAGUGGAGAAGGAGUAGUUCUUUAACCUUUGG | |
| | GAGCAUCAACUUCCUCAUCAGUAAAUAAGAGAUAAAACAAUAUCACUGAU | |
| | UUCUCUACUUAUAUGAUUUUAUAUGAUUAUAUAACAUUUACAAAUAUUAA | |
| | UUAGUAUGGUUGAGAAGCAUGGGAAAAGAAAGAUAAAGAUUACUUUACAG | |
| | AAAGUAAGGGUACUCCAUCAUUAAAAUAUAAAAAUCAAAGAGCUUGACUU | |
| | AAGUGCCGCAGGUGUAUUUCGGUAUAUGUAAAGAGCAUCCCAUUAAUAAA | |
| | UAUUAUCAAAUACCAUACACAUUGCUCCAGAUUUAUUUUAUAAAAGGGGG | |
| | AAGAGUUUCUGCUUUAUGGGACCAUGUAAGUGAGAGACUGGAGACAGGAG | |
| | ACAGACUAAGUGGUACCUUAAGAUCUCAUCUACCCCACGGGUCUUUAUAU | |
| | CACUUUUAGCUUCCUGCAGAAAGAUAAUAACAAGCUCAUAUAACCAAUAU | |
| | AUAAUGAAGUGAAAGUUGCCUUUAUUCAGACAACUUUACAGCAUUUAAAU | |
| | CAAAUUGCUCUUUAUUUCUUGGUCAUUUCAAAGAAUAUUUAAGGAUGAAA | |
| | ACAAAAAUAAAGGUUAUUGCUUCUGCUUUGAGAAAGUUUUCCUUCUCACA | |
| | UAAUCUUUGAUCAGGCUAUUGUGUCACUUGGCAACUUAAAGGCAGGAAAA | |
| | AGUUAUAUCUUUAAGUCCAGGGAUUCUAUUUAAAUGAAUUGCCAUUGAAA | |
| | AGUGGUUAUUCAAAUCAACUCACAGCUUAGUAACAUUGAAAAAUAAAGUA | |
| | AACUACUUUUGGGUUUCACAAGGAUCAUGCCAAGUUUCUGGGUCUGUCUA | |
| | AAUUAAUAAAAAUAAGACUUAGGAACCUGUAUGGAAAUUGUAGAUUAAAU | |
| | UAAGCAACUGCUUCAUCUGAAUAAAGCUUUGCAGAGUCUAAUAUUAUGAA | |
| | GGAGCUAUCUUCAUGAAUACAGUGCUUGCUUGGGAUUCAAGGGAUUUGAG | |
| | UUUUAAUGCCAGCUGAAUCCCUAAUGCCCACGGAGCACAUAUGCAUUCAU | |
| | UUGAUGCUGGUAGCUUUUCUGUCAAGUGGGAUUAAUAAUUACCUGCUCUA | |
| | CCACCCUUACCUUAUGUAUUAUAGUAUGAAUAUUCAAUACCAGUGUUCAC | |
| | GGAAUGCUCUGCCUUUCUGCAAAAUAACAUGGCAGAAGCAUUUAGAAAGG | |
| | AAAAAAAGUUUCUAAAAAAGUUUUAUGCGUAUCAGAUUUUCAAAAAUGUG | |
| | UCUCAGCUUUAAAAUACAUUAAUGAAUUUUGUAUUUUAUAUGAACCCUAA | |
| | AAAUGCUCUUGCCAAGUACUUAGUUAUCUGAAAGCUAAGAUAAUUGUUUU | |
| | GGGUUUCUUACAGCUUUGCUGCAUUUGUGUAUGUUAGUCCUUUGUCAAUG | |
| | GAUAAACACCAGAUUGACAUCGCUUAGUGAGUUAACUCUGAUGGGUGGCU | |
| | AGUAUUUUCGUUUUUUAUUGAUUACAACCAACAGAUAUUUAUUGCUGGAU | |
| | AAUGCAAACAUGAGGCACCAUGCCAUCAAGGAGCUUUAAUCUGGGUAAGG | |
| | AGAGUAUAUAGUCAUUUGGCAUGUCAAAUGAUUAAUUUUUCACAGAUACA | |
| | AGUGUUAAGAGUAUAUCAGUAUAGCCAGGCAUGGUGGUUUGCACCUGUAA | |
| | UUCCAACCACUUGGGAGGCUGAGGCGAGAAAAUUGCUUGAGGCCAGAAGU | |
| | UUGAGACAAGCCUGGGCAACAUGGUGAGUGAUAUGGUUUGGCUGUAUCUC | |
| | CACCCAAAUCUCAUCUUGAAUUAUAGUUCCCUUAAUCUUCAUGUGUCAUG | |
| | GGAGGGACCUGGUGGGAGGUAAUUGAAUCAUGGAGGAGGUUCCCCCAUGC | |
| | UGUUCUCAUGAUAGUGGGUGAGUUCUCAACAGAUCUGAUGACUUUAUGAG | |
| | GGGCUUUUCCCUGCUCUGCUCUGCACUUUUCCUUCCUGCAAUCAUGUGAA | |
| | GAAGGACGUGUUUGCUUCCUCUUCUGCCAUGAUUGUAAGUUUCCCGAGGC | |
| | CUCCUCAGCUAUGCGAAAUUGUGAGUCAAUUAAACCUCUUUCCUUUAUAA | |
| | AUUACCCAGUCUCAGGUAUUUCCUAACAGCAGUGUGAGAAUAGACUAAUA | |
| | CAGUGAGACUCCCAUCUCUACAAAAAUUAAAAAAAUAAUAAAUUAGCCAG | |
| | GCAUAGUGGCAAGUGCUUGUAGUGCAAGCUACUCUUGAGGCUGAGGUGGG | |
| | AAGAUCCUUGAGCCCAGCAAUUCCAGGCUUUAGUGAGCCCUGAUUGCAUC | |
| | ACUGCACUCUAGCUUGGGCAACAGAGUGAAACUUUGACUCUGAAAAAAAU | |
| | AUAUAAAAGUAUAAAAUACAGGGCCAGGCAUGGUGGCUCAUGCCUGUAAU | |
| | CCCAGCACUUUGGGAGGUUGAGGCAGGGGGAUCAUUUGAGGUCAGGCAUU | |
| | CAAGACUAGCCUGACCAACAUGGUGAAACCCCAUCUCUAAUAAAAUGCAA | |
| | AAAUUAGCCAGGUGUGGUGGCAGGCACCUGUAAUUUCAGCUACUUGGGAG | |
| | GCUGAGGUGGGAGAAUUGCUUGAACUCUGGAGGUGGAGUUUGCAGUGAGC | |
| | CGAGAUCAUGCCACUGCACUUCAGCCUGGGUGACAGAACAAGAAAAACGA | |
| | ACAAAACAACCCCCCCCAACCAAAACCAAACAAAUGAAAAACAAGUAUAA | |
| | AAUACAAUGCUCUCCCACUGCUACCAGGUGGAAAUGAUCUAAUUAUGAAA | |
| | CUACAGGUUUGAAGAGCAAUGGUUCCACUUCUUUUUCCAAAUGGCUGUGA | |
| | GCCUUGAGUCUGCCCCUGUUAUGGUGACAUACUGAGCAAUUAAUCAGUAG | |
| | UGAGCUAUACUUGAGAAUCUGGUGUACUAGCAAUAGGCUAGGUAGUCUGC | |
| | UGAUGUGAGCAGGUAGGAAAUAUCUCCUAAGACAGAGGGAAACAAAUUCG | |
| | CAUUUUAAUUUUUUUCACAUAAAAAUUAGGCAAUGAUAGAACAAUUACAU | |
| | CAUAUAUUUCUUAUAUCAUUUAGUCUUCAUCUCCAUUUGCAGAUGAGAAA | |
| | GUUGAGACUCAGGAAGGUCGAUUAAUUGAUACCAGGUAAACAAGCUACAA | |
| | AGAAAUAAACCAAGAUUUAGUACAUGUGUUCUGAUUUGGAGUAACACAUU | |
| | UUAUAUGCUGACAAGGUCCAUAGAUACAGAGGUAUAUCAUUACACAACCC | |
| | GCCCCAUCCCCUUUGCAACUUCCAACUCCCAGCUCCUGUGGGAAAAUAUC | |
| | CAGGGUUACUGGAUUCACAUGUUCCCUUAUUAAAAGCUUCCUCCCAGGAA | |
| | GGCUUGUAAAAUUCAUUUGCUCUUACACAUAAUGGACUCAUGGGGUUUAA | |
| | UUUGGGGAGAAUAAACCAUUAAACUAGAAGAAUUAAUUUCUACUUACAGA | |
| | AUUUGGCACAUUAGAGAGAAGAGACAAAGGGGAGUAUUUUGGAGGAUGAA | |
| | AGGUUAUGUUCCAGGCAUGGAACAUAGACGAUGGGCUGAAUGUCCAGGCA | |
| | UGUCAUUGUAUUUGCAAACCAUUCAUUCACUCAUUCAUUCAUUCAUUAGC | |
| | AUUGUCAACCACCUGCUUGAUUGUGCCCAUUUCCUGCCUUUCCUGUUUCU | |
| | AUAGAUGAAUUAUCUGUGUACCUGGUUAAGGCCACCCCUUACUGUGCACU | |
| | GCAUUAUAUCAGUACUCACCCACAAGGGCUUUGCUCUUGCACUUGUCCCC | |
| | GCUGUCUCCUGUAUCAUCAGUUUUCCAUUCUAUUAAAUGGUAUCCAUUUA | |
| | UAAACAUGCUAUUUCCCUUUAAAAAGCCCUCUUUGACCCGAGGCACUCCU | |
| | CUAUCUAUUGCUGUAUUUCAUUUCUCCCUUAUAAGCAAAACUCUCCCAAA | |
| | UAAUUGUACUGCUCUACUGGUUUCCUCUCCUCCAGUCAUCUUCUGGAAAC | |
| | UUCUAACCAAGUUUUCUCCUCACAAUUCCACUAAAAGUGUUCUUCCUGAG | |
| | AUUAUGACAUUCCAUGUGCCAAAUAUAAUGACCAAUUCCUUCACUUGGCC | |
| | UCCAGAACACUGAAUGUCUUUCCUUCCUCAUGGGCUUCUCUUUCUCGGUU | |
| | GGUUCCUCCUCAUGUUCCUCAAGUCUAAAUAUUGGAAUGCUCCAGAGGGU | |
| | UGUGGACCUCUUCAUUUUUGUCCUAUAAUAACUCCCUAGGCCAAGUAUCU | |
| | CAAUCUAAAUAACAUCCGUAUGCUGAUGCUUCCCAAAUUUAUAUCUCUAG | |
| | CCAGACUUUUCCUCUGAACUCUAGAUCUAUGUCUCUCUCCAGCAGCCUUC | |
| | UUGACAGCCAAAACUUAGCACAUCCAAAAUGGACAUCAUGGCUUUCUCCC | |
| | CCCUACACCAUGCCCUUGAUGUAACAUGUUCCAAAUCUUUUCCAUUGCAG | |
| | UAAAAUGCAAUUCAAUUUUUCUAAUUACUCAGGUCAGAAAUCUUGGAGUC | |
| | UUGCAUGAUUCCUGUUUUUCUCUGAUAUUUCCCAUUUCAAAUGCAUCAGC | |
| | AAAUCCUAUCAGCUCAACAUUCACAAGGAAGCGAGACUGUCACCACUUCU | |
| | CAUCACCAGCUGUCGCUGUUCUGAUCCAAGUAACCAUUACCUCAAACCUG | |
| | GAUUAUCAAAUUAACAUCUUACUGGAUCUCCCUUCUUUCAUUCUUUCCCC | |
| | UUUACAAUUAAUUCCUCUUGUAGCUGCCACAGUGAUCCUUUAUAUUAUCU | |
| | GAUCAGUUGUUUCAUUCCUCUAUUCAGAAUCCUUUAACAACAUCCUAUUU | |
| | CACUCAGAGUAUGGGUCAAUGUGCAUGUACCAUGCCUACAAAUCUACCCU | |
| | GGUCUCUACCUAUUACUUCUCCAACUCCUUUCCUUCCCCUCACACCAUCC | |
| | CAGCCACACUGCUGCACUUGGUUCUCAGGCUAAGCAGGAUUUCUUAUCAA | |
| | GACCUCGGCCUUUUCUUGUUGUCAAGAAAAAACUUUCUCCAGAUAUCUGU | |
| | AUGGGCUUUUCUUUUCUUAUUUCAGGUGGUGUCUUGAAUUCAUCUAAUUG | |
| | GAGAAGACUUUUUGGCCAUCUAUAAAAAAUAGCAGUGCACAUCUUUGCCU | |
| | UUCUACCAUCAUUAUCCCUGAUUUGGGUUCUUUAUAGCACCUGAUGUAUA | |
| | UAUCUACAUAUAUAUGUAUUUUUCUAUAUCUACAUCUAUUUCAUAUCCAU | |
| | AUGAUCUGUAUCUUUAUCUAUCUAUCUAUCUAUCUAUCUAUCUAUCUAUC | |
| | UAUCUAUCUAUCAUCUAUCUAUCUAAUCUUUGGUAUUGUCUGUCUCUUUU | |
| | CUCUCUCCAAUUAGAAUAUAAUCUCCAUGAAGACAAAGAACUUUGUCUAU | |
| | UUUAUUCAUUUCUAAAUCCUCAAAACUAGAACACAUGGUAGCACAUGGUA | |
| | GGUAGUUAAUACAUAUUUAUUGAAUGAAUAAGUGAAUAAAUAGACAAAUG | |
| | AGUUGCAGACUGUUUGGGUACCUUCCAGUUUUAAGCACUGAGGCCCCAUG | |
| | UUGAAUGGGAGAGGGAAAUGUGAACAGAUAAUUUAAAAUAUUAUGUGAUA | |
| | AAUAAAAUAGUAAAAAUAACUAUUGCCUUUCAAAGUAAUUUUAUCUGGAA | |
| | AUAUAAAUUUUAAAAUUUAAAAAAUAUUAUAUAAAAUUUAAUAAGAGAUU | |
| | AUUUUCUUUAUAAAGAGAAAGAGGGGCAUUUGGCAAGUAUACUAAACUUA | |
| | AUAGCAAGAAAACUUAAAUUCAUAUUGUGAUUACAUUGUUUACUAGCUGU | |
| | AGAAUCUUAGGAAAAUAACUCAUCUAGUCUCUUCCUCCCAUUGUACCUAG | |
| | UAUACUAUCUAAUUUAUUUUAUAGUUGUGAAGAUUUAGUCAGAUAAUAUC | |
| | AUACAUAAUGGGCAUUAAGUAGAUAUUAUUUUUAUUUCUUUCCAUAUCUA | |
| | AUACUAUACUUUACAUUCAUAGGUUAACCUUCUGUGAUCUGUCUUAUUCC | |
| | UCUGCAAUUUUUCAAUGACUUUCUAAAUUCCCACUUCAUUGACUUUCUUC | |
| | CAUUUUCUUCCUGUGAGACUUUUUGACAUCAUGUGAUGCCAUACUCAGCC | |
| | UCAUCAUCCCCACGAAGAUUAAUCAUCUUUCUCUCCUUGCUUCAACAAUA | |
| | UUGCAUGUGAUAUUUAGCUCUAUUUCUAUGGAUGGAAGCAAGGAGAGAAA | |
| | GAUGAUUAAUCUUCGUGGGGAUGAUGAGGCUGAGUAUGGCAUCACAUGAU | |
| | GUCAAAAAGUCUCACAGGAAGAAAAUGGAAGAAAGUCAAGGAAGUGGGAA | |
| | UUUUGAAAGUCAUUGAAAAAUUGUGGAGGAAUAAGACUGAUCACAGAAGU | |
| | AACCUAUGAAAGUAAAGGAAUCAUAUAAUGUGUACUCUUUUGUCUAUUUU | |
| | UUUCACUCAUCAGAAUUACUUUGAGAUUCAUGCAUGUUGUUUUAUGUAUG | |
| | CAUAGUUAAUCCUUUUUAUUGCUGAACACUAUUCCAUUGCAUGGAUAUAC | |
| | CAAAAUGUGUUUAUUCAUUCACUUGUUGACAAGCAUUUGUUUUUAUGUUU | |
| | UUUUGCUAUUACAAAUAAAACAUUCAUCUGCCAAAAAAAAAAAAAAAAGA | |
| | ACUGGUGAGUUCUUUAGCUCUAUUUCUAUGGAUGGAAAGCUGGAUUAAUU | |
| | UUCAACAUUGUAGGACAGUAAUAAGUGAAUAUUUAUUCUUUAAUUGGAAU | |
| | UAUGUUUCUUUGAGUUGCUUGUCACUAAUACGUAGUGAAUCAAUGGAAAU | |
| | GAAAAGGACACUCAUAAAGUAACUGCAUAGUGAGUACAUAAACCAAAACC | |
| | AUGGCUAUCUUUUUACCCUGUGCUACAGCAAGGCUAGUGAAACAAGAGCA | |
| | ACAUGAAUAUUUUUAAGAAAGAGUAUCACAAUGGUAAAUUUUAUUUGUAG | |
| | GGCAUUAUGUAGAAGAGAAAAUUUUCAGGAAUAAUUAUAUUAGACUCAUC | |
| | UCUUUGAUGACAGACACUAUUUCCUAUUCAUAUUGCAAAAUAAUUGGCAA | |
| | GUACAUGUUUUAAAAAAAUGAGUGUUUUUUUUCCUGUGAGACAUCUGUAU | |
| | UUUACUACAGGUGGGACAAAGUUAUUUCGGUCCUUAUUUUGCCACUAGGA | |
| | UAUUGGCAGGCAGAGGGUGACAAAAUAAUGUAACAUCUGAAAUUUCAGGC | |
| | UAUGAGGAAACUCACAUACAUACAAUUUGUCAGACAAUUAGGAUAUUUCU | |
| | AAAAUGUGAACAGAUGUAUAAUAGAAAUUAGCAAAAUGAAAAAUGACCUU | |
| | UUUUUGUUUUUGAUGGAUACAUAAAGAAUUUAUAUGCAGUUUUCUAGGUU | |
| | AGCCUAGUUAAAACCUCUUCUUUCUACAUAUUCAGUUAAGAAAUAAUUGU | |
| | UAAUUGAGACCAAGACAUUAUAAUUGUUUCCCUUUUGUAUUAUAAUAAUG | |
| | AAAAAUAUCAAGAAUUAUAUCUUAUAACUUUUUACACAGGUCCAAGUGAU | |
| | GUUUUCUGAACUUGCAUGCCACAUUUUUUUAGCCAAGUGUUCACCAGUUG | |
| | GGAACUCCUAGGGGUUGUUUAUUUUUCAGUGAAAGACAAUCUUUUAAGGA | |
| | GUUUAUGUCCUAAAUAUUUUCUGGUUUUGCAGUAGCAUACAUCAGACAUA | |
| | GUCAUUGUGUUUGGAUUGGGAUUUUCACUUUUAACAUGUUCUCAAAUUCU | |
| | CUAGGCGUUUAAUGUUUCCAUCUGGUCCUCAUAAAAGGUUUCACAUUUGU | |
| | AAUGCAGCUCAGGCUCCUACUCAGAGAGCAUCAUUAUAAUUCUAUCCAUG | |
| | ACUCUAGUUUGAUAGAGCAGAUACUUUUAAAACUUUGGAUUUGUUUUUUG | |
| | CUUUUGUGUUCUGUCUUAAACCUAGGAAUAACACUUGAGUUUAAUGGUUG | |
| | UUUCUCUCUGAAAAUAAUCAUAGUGUGCACACCAUGACAACAGGCUCACA | |
| | CCCCACUUCCUUCUGUGCCGUUUGAAGCUCCUAGGGCAGAAGGAGUAACC | |
| | ACAUUGUGAGCCCAGUAUGAGGAAACUUAGCAGUCGUCUUACUUUCUCUU | |
| | CAUUAAACAAUCUGUUCUCAGUCAUCACAGAUGGAGAGGAUAUUUUCAAG | |
| | GACUUGAACAUUUUCUUGAAAUAGCCAAACAACUAGGAAUCUCCUUUUGC | |
| | CAUGUUAAAUAAUAGGUUCUAGGGCACAAUUUGAGCAAAGUUCACAGCUU | |
| | CUAGCAAGGUCUUUUUAUGUAGUUAGGUGUGCAGUGCAUGUGGAUUUGUU | |
| | UAGUGAGUAUGUACUUAAGUAACACUAUAUGUCAGGCAAUGCUCUAACUA | |
| | AACUUCACAAAUAGUAACUCAUUUAAUCCUCACAGUAACUUUAUGAAUAC | |
| | GGUACUAUUAGUAUCCCCAUCCAAGGAUGUAGAAACUGAGGCAUAAGGCA | |
| | AAAAGACCACAGCUAGCAAGUGGAAGAGCCAGAAUUAAAACCUAGGUGGU | |
| | CUGGCUCAAGAAUCCAUGGUCUUAACUGUGAAACUGUGCUAUGACUGAAU | |
| | GUGUUCAGUGUCAGAUUUUCAAAGAUCUAUUAUUAUCUUCCCAGAAUUGA | |
| | AUUGCACACUUUGUGUAACUCUCCCCAACACCAUUCUUGAUUCAUAAUUG | |
| | GUACUCAGUGAAUGUUUUUUUACCUUAGGAUUUAAUUAAGAGUGAGUGAA | |
| | AUGAUAACUGAUUUUGCCAUCAUUUGAAAAAAAGGCAGAACCAAAGGUGA | |
| | AUCAUAAUGGUAGCCAGUGGACAGGCAGUUUUUCAUUCAGAAGUGUCAAU | |
| | GGAUCCCGUUAUCCAAGGAUAACCUAUAUUUAAGGCCCAGAUACUUCUAA | |
| | GAUGAUGCUUUGGAUUCUACAUUUUCAAAUCUGGAAGAACUAUCUUCAUU | |
| | UCACUAAUUGUUCUUUACUGAUACAGUUUUUUUAAAUUUAAGUGUGGUGA | |
| | AACACAACCCAAAAUUUACCAUCUUCGCUAUUUCUAGGUGUACAGUUCAG | |
| | UAGUGUUACGUAAUUCACAUUCUUGUGCAACCAGCCUCCAGAACUCUUUU | |
| | CAUCUUUCAAAACUAAAAGUCUAUACCACUUAAGCAACCACUCCUCGGUU | |
| | UUUCUUCCCUCUAAGCUCUCAGAAACCACCACUUUUUAAAAAAAAAAUAA | |
| | CUCAUCCACCUAUGGAAAUUUAGGUUGCUUCCACCUUUUGGCUAUUGUGA | |
| | AUAAUGCUGUUAUGAACAUGGAUGUAAAAAUAUCUCUUUGAGACUCUACU | |
| | UUUAUUUCUUUGGGGUAUAUACCCAGAAAUGGAAGUGCUGAGUCAUAUGA | |
| | UAAUUCUAUUUUUAAUUUAUUUCCCAUACGGUUCUCCAUAAUGACUGUAU | |
| | CAUUUGACAUUCCCACCAACAGUGCAUAAAAGUUCACUUUCUCCACAUUC | |
| | UGACCAAUAUUUAUUAUUUUCUGUUAUUUUUUUCUGAUAGAAGUUAUCCU | |
| | AAUGGGUGUUAGAUGGCACAUCAUCUUGGCUUUGAUUUGUAUUUUCCUAA | |
| | UGAUUCGUGAUGUUGAGCAGCUUUUCACGUGAUUAUUGGCCAUUUAGUAU | |
| | CUUCUCUGGAAAAUGUCUGUUUAAGUCCUUUGUACAUUUUAAAAUUGGCU | |
| | UGCUGUGUUGUUGUUGAGUUGUAGGAAUUCUUUAUAUAUUCUAGGUAUUA | |
| | GCCCAUUGUCAGAUAUAUGAUUUGCAAAUAUUGUCUCCCUUCUGUGGACU | |
| | GGCUUUUCACUAUACUCUUGUGUUCUCUGAUGCACAGAAUUUUUACAUUU | |
| | UUAUGUAGCCUAAUUUAUCUACUUUCACUUUUUUGCCUAUGCUUUCUGGU | |
| | GUCAUAGCCAAAAAAUCAUUAUCAAAUCUAGUGUCAUGAACCUUUUCCCC | |
| | UAUGUUUCCUUAUAGAAGUUUUAUAGUUUGGGUCUUGUGUUUAGGUUUUU | |
| | GAUCCAUUUUGAGUUGAUUUUUGCAUAUCGUGUAAGAUUAGAGUCCAACU | |
| | GCUUUCUUUUGCAGUAUCCAGUAUCUUUUGCAGUAUGUUUUGUUGGUACC | |
| | CAGCUCUCCCAACACCAUUUGUUAAAGAAAAAAACCAUACAGAUUUAAGG | |
| | GAAACUCAGACCACAUAGCUAUAAACCUGGAGUUCCUCUCAUACUUUGGU | |
| | CCAAACCAUAAUAGAUUUAGAAAGAAUCACGACUAAAGUUCUCAACUGGG | |
| | GGCUCUUUUCUCCUGGCGAGAACAUUUAGCAGUAGGUGGGGACAUUUUUG | |
| | GUUGUCACAUCUUGGGGUGGGAGUGGGGGUAGCAGUUGUUACUGGAAUCU | |
| | AGUGAGUAGAGGUUACGAAUGUUGCUAAAUACCCUGCAAUAAACAGCUCC | |
| | CUAAAGCAAAGAAGUAUCUGGCUUCAAAUGUCAGUAGUGCUGAGGUUGAG | |
| | GAACCCUGGCCUAGAGUAUAGGGAAGUACAGGUUAUGUUGUAGGACUGGA | |
| | AAAUUGGGGAAUCUCCUUUUUUUGCCAUUUGAGGGCUUGAUGAUCAUUGC | |
| | ACAGGUGACUACCUAAGUGUCCAAUUAUUGACUACUUGGUAGUUGGUUUU | |
| | UUAAAGAUACCUGAAUUUCAUAUACAUCCAGUUAGGUUUUAACAACAGAA | |
| | UGCUAUUUUGAGCUUAACUUUUGCCUUUAAGACUGUUCUUCUCACUUUCU | |
| | UUCACCAUAAUUUUGUCCAUUUAUGCAUUCAUUUUCUCUUUUCUGUAAGA | |
| | AAACAAGUAAAUAAUUGUAGGAUUGAUCAUAAGAAUUGGAGUCCUAUUAG | |
| | ACUAUACAAUAAUCAAGGAUUACAGAAAUGCCUAGAGAUUGUUUUGGCCU | |
| | AGCUGCUCCUCCUACUUCUGAGCUACUUACAGGAGAAAGAUGCCCAAUUG | |
| | ACAAUAUAAACAUGAAAUUAAUUACUUUAUAAUAAAUAGUUAAUUUAUAA | |
| | CACCCAGGCUUGUGUUUAAAAUUCCAGAGCUUGGCUCUCUGCUGAACUGA | |
| | GCUGGAGUACACGACUUCAGCCCAAAGUAAUUUUAUAUUGGGUGUUUAUG | |
| | GUCAGGGAAACUUCGUUGCAGAGGUCAUGCUUGAGCUGAGACCUGACUGG | |
| | CUAAAAGCCUCAAGCCAUGAGAACAUUUGGAAGAAGAGUAUUUCCACAAG | |
| | AAAAAAAAAACAGAAAAUUAAAGUGCAAAGAUCUUAAGGUAGGAAUAAAC | |
| | UUGGCAUGUUCAAGAAAUAGAAAUAAGGCCAGUGAGGCUGAUGCUCUGAG | |
| | UUACUGAGGAUAACAGAAGUAUGAUGCAACUGCUGAAAUCAAAUUAAUAU | |
| | UUCUUUUUCCAGAGGAAAAGGUGGGGGGUGUUUGAUUAGAACUUCUCCUG | |
| | GUAUAAGGGGAGAUUCUCUCAACCUUGGACACCUGAAGUUGGCAGGUGUG | |
| | UAAAGCAUUGGUUUUGUAUUGCAUGGUUGGUUCACGUUAUCAAUUACUGU | |
| | UUAAGUAUUUAUUUAUUCACUUUUCAAAAACUGCUAAUAAUUUUCUAUAU | |
| | UCUAGGCACCAUUAUAGGGCUAGGCAUUGGAGAAAUUGAGAUGCAUAAGA | |
| | CAAAAUGCUUAUGUUUAGGAGCUCGUAGUGUGCAUUUAUGGAUUGGAUAG | |
| | UUGGAUAGAACUCUUCUAAUUAUUGACUAUGUGACCUUGGGAAAGUUAUU | |
| | AAACCUCUCUGUGUCUGAGUAUCUCCAUCUCUAAAAUGAGAUAUUUAUUG | |
| | CAGUUACUUCAUGGAGUUGUUGUGAGGAUUAAGUGAGUUAAUACCUUUAA | |
| | AGCAGCACCUGAGACGUAAUAACCACUCAGUAACUUAGCUAUUAUUGUUG | |
| | UGGUGGUUUUACAGAAGCACAGGAAGAGACUCAUUAAUUCAGUCUCAAAG | |
| | GUUAGAGAGAAUUUAAAAGAAAAGGUGAAGUUUGAGUUCAUUCAUUAACU | |
| | CAUCAUUUGUUUGAUAAAUAUAUAUCAAGUGCCUACUGUAUUCCACAUAC | |
| | UACUUUUCUGCUACGGCACAUACUUCUUUCUUGCUGCCUGGAUUAUCUUU | |
| | GACACCAUUAUUCAGCUGUCAAACUUUAACAUCCACAUCAUCCUCUUCAA | |
| | UGUAACCUUCUUCAGUUUAAGGAAGAGUAUAUAUUAGAGAUAAAAAUUGU | |
| | ACAAAUAAUAAUUUAGUUACAAUUGUCAACCAUGAUAUCAAGUGUAAUCC | |
| | AGUCAGUGAGAGGAAAAAUGCAAGGAACAUCUAAAAAGUGUGAAAGAUAA | |
| | GGAAAUGUCUUAGCUAAGAGAUGCAAUAUAUGAGAGAUAAGAAAUGCAAA | |
| | AUAUCAUAAGAAAAAAUAAUCAUAAUCAUCAACUUUGUAGGUUUCCCAAA | |
| | CUUCUUAUAGUUUAUGUAUUUAUCUUCUAAUUUUCUAAGAGUUGAGCACU | |
| | UAUAACCAAAAGGGCUUCAAUGCUUGCUUUUGAGUCAGCCAUAAGUGGAU | |
| | AAGGAGCAAAAGGAUGCAGCUUGCUUUCAACGCCAAGUCAGACUUGUGUU | |
| | GGAGGAGGUGUUUAGGGAUGGGUUUUCUAAGGGAGAAGAAUAUGUAGGGC | |
| | ACCUACUGAAGGAGAAGAGUAUGGGCUCUUUGGCCAUUCUUGCAGAGAAA | |
| | ACAACAGAGUGUGGGUGGGAUAAGGAGCAGAACUAGGCUAGAAUAGGGAG | |
| | CAUUAGGUUGGAACAGGAGGGCUGGAGGGUAGUUCUCUGGAAUUUUGAUU | |
| | GUGCCUAUAUAAGCAAUUCUUUGCCUUUUUUUGGAUUUACAUACUUGAUG | |
| | UCUUCUUUCAGACUGUUGAAUAUUAGAGCAAACAUUUGAGAGCAGAGAAU | |
| | UUAUUGUAUUUGUGUAACCAGUAUCUCUCAUUCUGCUGCAUAUAUAUAAG | |
| | GCCUUUAGUAAAUGUUUGCUGAAUUUCCCUAUCAAUUUAUAUAUCAAUUA | |
| | AUGAGAUAAUAAAAUGAGAUUGGAAGAAGAGGAUCAUAUCCAGUAGACCU | |
| | AGCCUAUAAUUUGUUCAAUAUUGAUGUGUUUAAAAAUUAAAAAAGCUACC | |
| | UAGAUAAAAGGCCAAAAUAUAACAUGUAGUUAUGACAGUCAGGGUUUAUU | |
| | UAGCAUUUCUAUAAGCCAGUAGCCUUUCAAUUUAUUCUGCAUGUAUUCAG | |
| | UGGUGGUGGUAGACAACUGGUUUUGAGUCAAAAUUGCAUAUAGGAUCACA | |
| | UUUUCUUGCUAAUUCAACUUUCUUAGUUCUAGGUUGGUAAAUAUUGUAGA | |
| | AAAAGCAAAAUGUUUCCCACAUGUCUACAGAUUUUCUUGCUUUAAUAGCU | |
| | UCAUUUGUGAUUUUGGGAACCAGAAUAUUUUUAAAUAAAACAAGUCAUUU | |
| | AUUCCUGGAAUAAGUCCCUAUGCCAUGCAUGUCUUGAGAUUAGAAACUCA | |
| | GCUGAGAGCAACUAGUGAUUAUUCCCUGACUACAACUAUUUGUGAGAUAC | |
| | AGAAAUCUUAAUGAUGAUAAUCCAGUAUUAGUGAGAUUUUUAAAAAAUAU | |
| | AUAUAUAUAUAUUCAAGGGUGCUUUCCAAGAACAAUUUAUACCUCACCAA | |
| | UUAUUUACUGAGUUGUAUGUGGAAAUUGGAAUUAACUGGCACCAUUUAUU | |
| | UCAGUUACAUUUUGAAACCACUUACAGAUUGACACCUGGGUAACUGGCUA | |
| | UAUUUUAUAUAGCUCUGCACGGAUCAUAGAGUUUUAGAGGUAGAAGUUAG | |
| | UUUUUUCUUUUAGUGUUACUCUUGUAACAGGAUGUAUUUAACUGUUUCAG | |
| | CAAAAGGAAGACAGACGUUUCCAUCUAAAGAGUAUGUGGUUUUAGGCCGG | |
| | GCACGGUGGCUCACACCUGUAAUCCCAGCACUUAGGGAGGCCAAUGCGGG | |
| | CGGAUCACGAGGUCAGGAGGUCGAGACCAUCUUGGCUAACACCGUGAAAC | |
| | CCCGUCUCUACCAAAAAUACAAAAAAUUAGCCGGGCAUGGUGGUGGCGGG | |
| | CGCCUGUAGUCCCAGCUAGUCGGGAGGCUGAGGUAGGAGAACGGCGUGAA | |
| | CCCAGGAGGCGGAGCUUGCAGUGAGCCGAGAUCGUGCCACUGCACUCCAG | |
| | CCUGGGCGACAGGGUGAGACUCUGUCUCACAAAAAAUAAACAAAAUAAAA | |
| | UAAAAAAAGAGUAUGUGGUUUUGACUUUUAUAAUACAGUAGAUUCUGCUU | |
| | GAAUAAAUUUUAAGAUUAAGUAUUUUAAUGUGCUUUGUGUAGAUACAACA | |
| | GAAAUAUCAAAGGACAAUUCCAAUAUGAGGUUAAUAUUUUAAUAUCUUAU | |
| | AUCAAAAUAUCUGAGCACCUAGAAACUGGCAGUGACAAUUAACAGCUUAA | |
| | AUGAUUCUUCAAAUAAUUCAAUUUAAGGGUAGGAUUUGGAAACAAGUAGC | |
| | AUUAUCAGACUGAAAAUAACACCAUUUUAUAAGAAUGUCUAUGGAUACAA | |
| | UCUUAAGUUAGUGGCGUAUGCCUUUUAUAUAUUUAUCCAACCAUUAUCCU | |
| | CUAUGUGCAAAGAAUGUGAUCUAAAGAAUGUGUUAAGGCAGAUAAUACGU | |
| | GUGUAUUAUAAUAAUUAAAAGGUUCUGUGAUACAGACUCUGACCUGAGGA | |
| | UAAAGUACUACAAGAUAUAAUAACUACCAUAAUUUUAUAUUUUAUAAUGA | |
| | UAAAACUACCUAUAGAAUGAAAUACCUUAUAUCUUACUUUUUGCUGCUUU | |
| | UGGGUUAAUUAUGCACUUAAAUAAAUGGAUAGAGUUCUUACUUACCGUUU | |
| | UCACAUUUAAAUUCAUCCUGAUAUGAUGACAUAUAGUUUUAAUGACCUGG | |
| | UUAAUACUGAUGAAAACUUUCAGUGGCAGUGCCUGGGGCCAGUAGUCUGC | |
| | UGCAUAUUUUAUUUUUAUAUUAUUGCAAUAAUAACAAAAGAUAUUGGUGC | |
| | UUCUUUUCACCUACAAAUAAUCAAUUAAGGAACUGAAGCUUAAUUUAUUU | |
| | AAAAAGCAAUUUUUAGAACAAGUCGAUAGUUCACAUAGAGCUAUUUAAAU | |
| | GUCCCAUGCAAAUUGAUGGAAUGUUCUAGCAAAUAUUAUUUAGAAAAUUA | |
| | UUAUUAUUGUUAUUCUUUUUUUUUUUUUUUUUGAGAUGGAGUCUUGCUCU | |
| | GUCACCCAGGCUGGAGUGCAGUGAUGUGAUCUUGGUUUGCUGCAGCCUCU | |
| | GCCUCCCAGGUUCAAGCAAUUCAUCUGCCUCUGCCUCCUGAGUAGCUGGG | |
| | ACUACAGGUGUGCAUUGAAAUGCCUGGCUCAUUUUUGUAUUUUUAGCAAA | |
| | GACAGGGUUUCACCAUGUUGGGCAGGAUGGUCUUGAUCUCCUGACCUUGU | |
| | GAUCCGCCCCCUUGACCUCCCAAAGUGCUGGGAUUACAGGCAUGAGCCAC | |
| | CGUGCCCAGACUAGAAAAUUAUUUUUAAUAGCUCACAUUCUUUGCCCAGU | |
| | CAUUUCACACCGGUAUUCCAUAAGAGUUCCCUUGCAGCCAGAAACAGAAA | |
| | GGAUUAGAUUUUAAUAUCAUCUAACAAUAUUCUUUUGUUGUUUAAUCACA | |
| | CUUUAUAGUGCUAACCCAAAUCUGAUCUGGAAAUCUGUUCAGAUCCAGUU | |
| | UGAGGAACUAGUUGAGUAGACAAUACUCUCAGAGAGCUACAGGAACUAAA | |
| | UGUACAUCUCUUGUUCAUUUGUAGACAUCAUUCAAGCCUCAGGCUUGGAU | |
| | UCUUCGUUUAGGUCUGCCAGUCAACAAGAAUUCACUGGGUGGUUACUCAU | |
| | GACAGAGACCUGUAUGAGACUGUGUACAUAGAAGUCAAAGAAAAAUAGUU | |
| | ACUAUCGACAAGCAUAUAUUGAUACAUAUAGGCACAAUUUUUCUUUCAAA | |
| | AGUUUGCAUUACUGUUGAGGAAAGUAGACAUCUAUAUUUUUAUAAUGCCU | |
| | AUUUGAAAUUUGUCCAGGAAAUUCUGUUGCUGGUCAACAGUGUAGCUAGG | |
| | CCUGGUAUAAGAACAGGUCAGGUACAGUAGGAUUCUGAUUAAGGCAGGUG | |
| | UCUGGCAUAAAAAUAGUGAACGUUAGGAAGGUAGGAUUCCUGGUAUAUAG | |
| | CAUUACUUAAAGAACACUUUGAACUCUUUUUUUUUUAAUAUACUUUAAGC | |
| | UCUACGGUACAUGUGCACAACGUGCAGGUUUGUUACAUAUGUAUACAUGU | |
| | GCCAUGUUGGUGUGCUGCACCCGAUAACUCGUCAUUUAUAUUAGGUAUAU | |
| | CUCCUAAUGCUAUCCCUCCUCCCUCCCCCCACCCCAUGGACAGGCCCUGG | |
| | UGUGUGAUGUUCCCCAACCUGUGUCCAAGUGUUCUCAUUGUUCAAUUCCC | |
| | ACCUAUGAGUCAGAACAUGUGGUGUUUGGUUUUCUGUCCUUGUGAUAGUU | |
| | UGCUGAGAAUGAUGGUUUCCAGCUUCAUCCAUGUCCCUACAAAGGAGAUG | |
| | AACUCAUCCUUUUUUAUGGCUGCAUAGUAUUCCAUGGUGUAUAUGUGCCA | |
| | CAUUUUCUUAAUCCAGUCUAUCAUUGAUGGACAUUUGGGUUGGUUCCAAG | |
| | UCUUUGCUAUUGUGAAUAGUGCCACAAUAAACAUAAGUGUGCAUGUGUCU | |
| | UUAUAGCAGCAUGAUUUAUAAUCCUUUGGGUAUAUGCCCAGUAACGGGAU | |
| | GGCUGGGUCAAAUGGUAUUUCUAGUUCUAGAUCCUUGAGGAAUCGCCAUA | |
| | CUGUCUUCCACAAUGGUUGAACUAGUUUACAGUCUCACCAACAGUGUAAA | |
| | AGCGUUCCUACUCCUCCACAUCCUCUCCAGCACCUGUUGUUUCCUGACUU | |
| | UUUAAUGAUUGCCAUUCUAACUGGUGUGAGAUGGUAUCUCAUUGUGGUUU | |
| | UGAUUUGCAUUUCUCUGAUGGCCAGUGAUGUUGAGCAUUUUUUCAUGUGU | |
| | CUGUUGGCUGCAUAAAUGUCUUCUUUUGAGAAUUGUCUGUUUAUAUCCUU | |
| | UGCCCACUUUUUGAUGGGGUUGUUUGAUUUUUUCUUGUAAAUUUGUUUAA | |
| | GUUCAUUGUAGAUUCUGGAUAUUAGCCCUUUGUCAGAUGAGUAGAUUGCA | |
| | AAAACUUUCUCCCAUUCAAUAAGUUGCCUGUUCACUCUGAUGGUAGUUUC | |
| | UUUGGCUGUGCAGAUGCUCUUUAGUUUAAUUAGAUCCCGUUUGUCAAUUU | |
| | UGGCUUUUGUUGCCAUUGCUUUUGGUGUUUUAGUCAUGAAGUCCUUGCCC | |
| | AUGCCUAUGUCCUGAAUGGUAUUGCCUAGGUUUUCUUCUAGGAUUUUUAU | |
| | GGCUUUAGGUCUAACAUUCAAGUCUUUAAUCCAUCUUGAAUUAAUUUUUG | |
| | UAUAAGAUAUAAGGAAGGGAUCCAGUUUCAGCUUUCUAUAUAUCGCUAGG | |
| | CAGUUUUCCCAGCACCAUUUAUUAAAUAGGGAAUCCUUUCCCCAUUUCUU | |
| | GUUUUUGUCAGGUUUGUCAAAGAUCAGAUGGUUGUAGAGGUAUUAUUUCU | |
| | GAGGGCUCUGUUCUGUUCCAUUGAUCUAUAUCUCUGUUUUGGUACCAGUA | |
| | CCAUGCUAUUUUGGUUAUUGUAGCCUUGUAGUAUAGUUUGAAGUCAGGUA | |
| | GCGUGAUGCCUCCAGCUUUGUUCUUUUGGCUUAGGAUUGUCUUGGCAAUG | |
| | CGGGCUCUUUUUUGGUUCCAUAUGAACUUUAAAGUAGUUUUUUCCAAUUC | |
| | UGUGAAGAAAGUCAUUGGUAGCUUGAUGGGGAUGGCAUUGAAUCUAUAAA | |
| | UUACCUUGGGCAAUAUGGCUAUUUUCACAGUAUUGAUACUUCCUAUCCAU | |
| | GAGCAUGGAAUGUUUUUCCAUUUGUUUCUGUCCUCUUUUAUUUUGUUGAG | |
| | CAGUGGUUAGUAGUUCUCCUUGAAGAGGUCCUUCACAUCCCUUGUAAGUU | |
| | GUAUUCCUAGAUAUUUUAUUGUCUUUGAAGCAAUUGUGAGUGGGAGUUCA | |
| | CUCGUGAUUUGGCUCUCUGUCUGUUAUUGGUGUAUAGGAAUGCUUGUGAU | |
| | UUUUGCACAUUGAUUUUGUAUCAUGAGACUUUGCUGAAGUUGCUUAUCAG | |
| | CUUAAGGAGAUUUUGGGCUGAGACGAUGGGGUUUUCUAAAUAUACAAUCA | |
| | UGUCAUCUGCAAACAGGGACAAUUUGACUUCCUCUUUUCCUAAUUGAAUA | |
| | CCCUGUAUUUCUUUCUCUUGCCUGAUUGCCCUGGCCAGAACUUCCAACAC | |
| | UGUUGAAUAGGAGUGGUGAGAGAGGGCAUCCCUGUCUUGUGCCAGUUUUU | |
| | AAAGGGAAUGCUUCCAGUUUGUGCCCAUUCAGCAUGAUAUUGGCUGUGGG | |
| | UUUGUCAUAAAUGGCUUUUAUUAUUUUGAGAUAUAUGCCAUCAGUACCUA | |
| | AUUUAUUUGGAGUUUUUAGCUUGUAGGGCUGUUGAAUUUUGUUGAAGGCC | |
| | CUUUCUGCAUCUAUUGUGAUAAUCAUGUGGUUUUUGUCUUUGAUUCUAUU | |
| | UAUAUGCUGGAUUACGUUUAUUGAUUUGCAUAUGCUGAACUAGCCUUGCA | |
| | UCCCAGGGAUGAAACCAACUUGAUUUUGGUGGAUAAGCUUUUUGAUGUGC | |
| | UGCUGGAUUCGGUUUGCCAGUAUUUUAUUGAGGAUUUUUGCAUCGAUGUU | |
| | CAUCAGGGAUAUUGAUCUAAAAUUCUCUUUUUUUUGUUGUGUCUCUGCCA | |
| | GGCUUUGGUAUCAGGAUGAUGCUGGCCUCAUAAAAUGAAUUAGGGAGGAU | |
| | UCCCUCUUUUUCUAUUGAUUGGAAUAAUUUCAGAAGGAAUGGUACCAGUU | |
| | CCUCUUUGUACCUCUGGUGGAUUUCGGCUGUGAAUCUGUCUGGUCCUGGA | |
| | CUUUUUUUCUUGGUAGGCUAUUAAUUAUUGCCUCAAUUUCAGAACCUGUU | |
| | AUUGGUCUAUUCAGGGAUUCAACUUCUUCCUGGUUUAGUCUUGGACUCUU | |
| | ACCAUUGAUUGUGUGGGGAUUGUAAAUGGUGACAAUCUGUUGGUACCUUG | |
| | GAGAGCUCCCAAUAGCCUCUAUCUUUGAUUUGUUAAGGUGCUACUGAGGC | |
| | UUUUUGUUGUCUUAGCUUUAGGCAUACUUUAUAAGCUCUGUCAUCCUGGU | |
| | GGAUCUAAAAGGUAGUUAAUGCAGCUGUACUUCAAUUUGCUGUGUUAGGC | |
| | UGUGUGGUACUCGGACAUUAUCUACAUUCUGUUAAAACCUUUUGGCCUUC | |
| | ACACCAGAUCUUAGGCAAUAUUUUUGGGUUCCUCAAAGUUUCCUAUGCAC | |
| | UAAGGAGGAUAGAUAGGCUUAUCAGUUCACAAUGUUGGCACACUUUGUCU | |
| | CCAGGGGAAAGAGCAUUUUUUGGCACAGACAAAAGAAGUAUUGCCAAGAA | |
| | CAAGGUAGCAUAUGCUCAGAUCCAAUUAGUGGCAGAGACAAUAAACACAG | |
| | UAAGAGUUCAGAGAAGGAAGUUGUUUCUGAGGGCUAUGGAACAAGUGAAA | |
| | AGCUCCAUGCAAUAGCAGGCCCUAUAGUAAUGAAAGCAUUCAGGUGGAAG | |
| | AGGGAAUUCCAGGUGAAGGAAAUGGUUAACAACAUUCUAUUGAUUUCAAU | |
| | UGAAGAAAAUUACAAGGCAAAAUUUUUAUUUUUAAUUAGCCUAUAAUCCA | |
| | CCUGAGGGAGAAAAGAACCAUGAAAGCAGAAACCAACAUUAGAUCAACUA | |
| | CCAUUUAUGUAGUAAAAAGAGUAAUAAGAUAUAGUGUAAACUUAAUAAUA | |
| | AUGUUUAGGAGAUAAAGCCUUAGGAAUAAAGGAUCUGUGUUGGGUAGGGU | |
| | UAUUUAGGGCACUCUUGAUUUCAGUUAUUAUUUUGUUUCUUAUAUUAGUA | |
| | CUUCAUUACUAUAUGUGUCUCAAGUGGAGAGUUGAACUCAGGAAAACAGC | |
| | CUCAGAAAGAAAAAGAAAAAAAAUACUACAUACUGAUCUCAGUUAUACAU | |
| | AUUUUGAUAAUUAAUAAUGUGAAUUGUUUCAGGCGGUUUAUUUUUUACCU | |
| | UUUGUGCUGCCUACCCACUACUUUUCAUAUUCCAGCCAGCCUCUUGACUU | |
| | UGGUGUUCUCCAUUCUGAGAGACUGUCCAUACAAGUAUCCUCCAUUAAUG | |
| | UGAAGUAGAGUUGCUUAUACUUACAAAAAGUCCUAGAGGAUAGAAAAACA | |
| | AUCAAUAAUGGGUGCAAAUAAUAGAUAAACACUAUUUUUGAUAGUAUUCA | |
| | GUAGGUCUCUUACCAAGUUAUUUUCAGAAUAUCUCUAAAAAAUAUUAAUC | |
| | UAGCAUCACUAUACCUUAGAGUUGGAAGUGCUUCAGAGAUCAUCUCAUUU | |
| | ACCCCUUACUCAAUCAGAUAGCCAUCCAACUUGCAUCACUUCUGUGAUUA | |
| | CUAGGUUCUGUCUGAACAUUUUCAGAUAUGGAAAGCUUGCUACCCCCAAG | |
| | GAAGCCAUUCUGCUGUUGACCAACACUUAGAAAGGUAUUGCAUUAAACUA | |
| | GAAUUUGUCCCUAUGACUUUAAAUAGAUUUUUCCAGUUUCUUUCCAAAGA | |
| | AGCUACACCAACUGUGUCAAUUCAUACGUUUAUUCAACAAAAUGUACAGG | |
| | UCAUAUAAUAUAUGCAAGGAAUUUUCUGAGCCCUACAAAUGAUAACUUGA | |
| | UAAACAUGGAUAUAAUACUGUCUUCUAUGAGAAGGCAGAUUCUUAAUACA | |
| | UUUUUUUGGAUCAGUAAAUAGAUGGAUAGAUGAAUCUUUUUCACCAUUAA | |
| | AUAAUGGUAAACUCUUGAUAUAUAGGUAAAGUUGGUGUAUUCCUUGGUAA | |
| | GUGAAGGAUGUGGAAUGAGCAUUUUAAUAUCCUAAUAUCCUCUAGAAUGG | |
| | UGAUGUAUUUUAUUUCAUAGCCUAUCAGUGUAAAAAAGAGGCAAAUACAA | |
| | UAUUUAUAUAUUUAUUUUCAAAUUAUAAAUAUGAAUUACUUAACUAAAGU | |
| | AUUAUGUAUAUGAACUAAAUAGAUGUUUUUAAAGAUUUAACAUAAGUAUA | |
| | UAUAGCUAUAUAUUUUAAUAGUUUAUACAGUGCCCUAUAUAACCCACAAG | |
| | UAUGAUUUAUAGCUUUGUUAAUUAUUUAAAUAUACUGCCUUUCUAGAAAA | |
| | CCAGCAUUUUAGUUGUCCAUUACAUCUUAGUUGUUUUCCUAACUGGAGUC | |
| | AAGUGAUCACAAUAUGGUAGCAUUUAAGAUUUGGCUUAAGAACAUAUUAG | |
| | AACUCACCAAGUUUUUCAAAAAAUAGGCUUUGAGACAAUAUUAAGAAACA | |
| | GAGUACUUCAAGGAAAGAAGUGAUAGAAGUAAUUUAUGAAAAACAAUUUA | |
| | UAUGAAAGCUUUGUACUUUCAAUAUAAAAGUACUAUAGAAGUAAAACACU | |
| | AUAAAGAUGGAUAAAAAGGAGAAGUUUGAAACUGUCAAGUAAGCUAAAUU | |
| | CCUUAUCUCUUUACAAGCCUAAUAACCCAGUUGGAAUAACUCAUAGAGUA | |
| | UAAAUCUGGGAUCUCAUUAAAAAUAAAUAUUUUCCAGUAACACAAUGAUG | |
| | CAGAGGCAAAAUGUAUGAAAUAGAAAAUAAAAGAAAGAAAAUAAUGACUU | |
| | CAUACUCUUCUUACCUAUUGUCUGCUAUGCCAGUUUGGAUUACCACACCA | |
| | CAGGUUUAGCUUGAGACUGAACUCAUAAUUUCUUCCCAGACUAAUGUUUC | |
| | CAUGUGAGUUUCCUAAUUCUGUGUAUGGUGUCACCAUUCUCUGGGUGUCC | |
| | CAGGCCCCCAACUUUAAACUUAACCCCUGUUCCCCAUUUCAUGACUAAUU | |
| | GUUUACCAAGUUAUUUUGAUUCUCUGCAAUAUCCAGCAAGCAAAUUAUCC | |
| | CAUGUACUUAGGUACAGUAAAAAUUUAGGACUGCUAACAACCACAAAGGU | |
| | UUGUGCUUUAAGUUUAGUUGUGAGCUCUGAAAAAUGUUAGAGUAUUAAGU | |
| | GUCAAACUUAAGAUGGCAAGUCCAUUUUCAUAAUUUAGUUUUUAGUUUCA | |
| | AUUUUGAAGAAUCUCAUCAAAUGUAUAUGUCUCAGAAUACAAACCUUUAA | |
| | UAAUAUAAUUAUUUUUCUGGUCAGUUACAUGUUUUAUUGUUUUCUUGAUC | |
| | CUUAGACUUACAACUUCAAAUAAAAAUGUAAAUAUCUGCAACAUUUGGGC | |
| | AAUAUUGCUUUAUAAAUGAAACUGUACAUACAAGUUCAGUUUUUCACUUU | |
| | UACAAACCUAGGAAAUGCCCUUGAAGCAUGAAUGACAGUGUUUCCUCAAG | |
| | AGGUUCACAUCCUAUUACAGUAGAAGGCAUGGUCAGGACUCAUGCCUACA | |
| | CUUUCAGCUUUGACCCACCCUGGCUUUGGAUCUUGGGUAAAUGGUUAGUC | |
| | UCACUCAGAAUAAAACUUAUACUAGACUUUUCAUGUCAAUGGUCCCUUUC | |
| | UAUGUCUAGCUAACAUUGUGCCUCAUGUCCUCUAUUAUCCCCAUCUGGCC | |
| | CUAAUUAGGUGAGGCUGUAUCAUGGCAGCAUAGCUUCGGGAUUAAGCUCU | |
| | CAGGCUUGAAGUCAGAUUCUUUGGGUAUAUGUCCCUGUUCUGCUACCUAU | |
| | GGUAACAGGACAGAAGCAUUUAAUCUCUAUGUUUUGUUGUCUGAUUUGUA | |
| | AAAUGAGGUAAUAAUAACACUUAAUUUAUGGGUUUGUUGUGAGAAUACCA | |
| | CAGGUUAAUAUAUAAAAGUUCUGAGGACUAGCACAUAAUAACUACUAUGU | |
| | GGUUGCUAUUAUUGAUAUUCAUAUAAAGCACUCAGCAAUGUGCCUGGUAU | |
| | AUAGUGUGUGCUCACUAAAUAUUAACUGUUAUUCUCAUUGCCAGACUCCA | |
| | CUUCAAUUUCUGUAAGCUUUAUUUCAGACUUUGGUCACAAAACAAAAUAG | |
| | AUGAAAGUAUAUCCUCAUAACACAAAUGCGUGUUCUUCACCUCAACAAAC | |
| | CAACCAAUUAUGGCGUCCUGAGGGAGGGUGUGUGCGUCACCUUGCAAUGU | |
| | UGUAACAUAUGCCUGCAAAGGACUAUUCUACAAUACAUGGCUCAGUAAAC | |
| | UUACGUUUUUCUUAACAGCUGCAAACUAAGAUUUGUUUUGAAUAAUCCUA | |
| | UUAGUUUGUGCCAGUGUUACUGUGAAAGUGCAUAUUCAAAUUCUUGGCCU | |
| | UUGUUUUACCUGUUAGCUUUAAUGUAUUUUACUUUUUAAUAUUAUAAUCU | |
| | ACUAAAAUCUAAAAAUAUGUGUAUUAAUCUGUUUCAUGCUGCUGAUAAAG | |
| | ACAUAUCUGAGACUGGGAAGGAGAAGAGGUUUAACUGGACUUACCACAUG | |
| | GCUGCAGAGGCCUCAGAAUCAUGGCUGGAGGAAAAAGGCACUUCUUACAU | |
| | GGCAGCAACAAGAGAAAAAUGAGGAAGAAGCAAAAGCAGAAACCCCCGAU | |
| | AAACCCAUCAGAUUUUGUGAAACUUAUUCCCUAUCACAAGAGUAGCACGG | |
| | GAAAGACUGGCCCCCAUGAGUCAAUUACCUCCCCCUGGGUCCCUCCCACA | |
| | ACAUGUGGAAAUUCUGGGACAUACAAUUCAAAUUGAGAUUUGGAUUCAGA | |
| | CACAGCCAAACCAUAUCAUUCUGUGCCUGGCCCCACCAAAUCUCAUGUCC | |
| | UCACAUUUCAAAACCAAACAUGCCUUCCCAACAAUCCCCUGAAGUCUUAA | |
| | CUCGUGACAGCAUUAACCCAAAAAUCCACAGUCCAAAGUCUCACCUGAGA | |
| | CAAGGCAAGUCCCUUCCACCUAUGAGCCUGUAAAAUCAAAAGCAAGCUAG | |
| | UUACUUCCUAGAUACAAUGGAGGUACAGGCAUUGGGUAAAUAUAGCCAUU | |
| | CCAAAUGGGAGAGAUUGGCCAAAACAAAGGGGUUAUGGGGCCCAUGCAAG | |
| | UCCAAAAUCCAACGGGGCAGUCAAAUUUUAAAGCUCCAAAACGAUCCCUG | |
| | ACUUUAUGUCUCACAUCCAGGUCACACUGAUGCAAGGGGUGGGUUCCCAU | |
| | GGUCUUGGGCAGCUUCACCCCUGUGACUUUGCAGGGUACAGCCCUCCCUC | |
| | CUGGCUGCUUUCACAGGUGGGUGUUGAGUAUCUGCGACUUUUCCAGGCAC | |
| | AUGGUGCAAGCUAUCGGUGGAUCUACCAUUCUAGUGUCUGGAGGAUGGUG | |
| | GCCCUCUUCUCACAGCUCCACUAGACAGUGCCCCAGUAGGGACUCUGUGU | |
| | GGGGGCUCCAACCCCACAUUUCCCUUCUGCAUUGCCCUAGCAGAGGUUCU | |
| | CCAUGAGGGUGCCGCCUCUGCAGCAAACUUUUGCCUGGGCAUGCGUGCAU | |
| | UUUCAUACAUCUUCUGAAAUCUAGGCGGAGGUUCACAAACCUCAGUUCUU | |
| | GAAUUCUGUGCAUCUCUGGGCUCAACAUCAAGUGGAAGUUGCCAAAGCUU | |
| | GGGGAUUCCACCCUCUGAAGCCACAGCCUGAGCUGUUUGUUGGCUCCUUU | |
| | CAGCCAAGGCUGGAGUGGCUGGGACACAGGGCACCAAGUACCUAGGCUAC | |
| | ACACAGCAUAGGGAACCUGGGCCUAGUCCACAAAACCACCUUUUCUUCCU | |
| | AAGCCUCAAGGCCUGUGAUGGGAGGGGCUGCUGUGAAGGUCUCUGAUGUG | |
| | GCCUGGAGACAUUUUCUCCAUGGUUUUGGGGAUUAACAUUAGACUCCUUG | |
| | CUACUUAUGCAAAUUUCUGCAGCCAGCUUGAAUUUCUCCCCAGAAAAUGG | |
| | GUUUUUCUUUUCUAUUGCAUAGUCAGGCUGCAAAUUUUCCAAACUUUUAU | |
| | GCUCUGCUUCCCUUAUAAAAUUGAAUGCCUUUAACAACACCAAAGUCACC | |
| | UCUUGAACAGUUUGCUGCCUUAGAAAUUUCUUCCAUCAGAUACCCUAAAU | |
| | CAUCCUUUUUAGGUUCAAAGUUCCACAAAUCUCUAGGGGAGGGGCAAAAU | |
| | GCCACCAGUCUUUUUGUUAAAACAUAACAAGAGUCACCUUUGCUCCAGUU | |
| | CCCAACAAGUUCCUCAUCUCCAUCUGAGACCACCUCAGCCUGAAUUUUAU | |
| | UGUCCAUAUUGCUAUCAGCAUUUUGGGCAAAGCCAUUCAAGAAGUCUCUA | |
| | GGAAGUUCCAAAUUUUCCCACAUUUUCCUGUCUUCUUCUGAGCCUUUCAA | |
| | ACUGUUCCAACCUCUGCCUGUUACCCAGUUCCAAAGUCACUUCCACAUUU | |
| | UCAGAUAUCUUUUCAGCAACGCCCCACUCUACUGGUACCAAUUUACUGUA | |
| | UUAGUCCUUUUUCACACUGCUUAUAAAGACAUAACCAAGACUGGGAAGGA | |
| | AAAAAAGUUUAUUUAGACUUACAGUUCCACAUGGCUGCAGAGGCCUCAGA | |
| | AUCAUGGUGGGAGGUGAAAGGCACUUCUUACAUAGUGGUGGCAAGAGAAA | |
| | AAUAAGGAAGAAGCAAAAGCAGAAACCCUUAAUAAACCCAUCAGAUUUCG | |
| | UGAGACAUAUUCACUAUCACGAGGGUAGCAUGGGUAAGACCGGCUCCUGU | |
| | GAUUCAAUUACCUCUCCCUGAGUCCCUCCCACAACACAUGGAAAUUCUAG | |
| | GAGAUACAAUUCAAGCUGAGAUUUGGGUGGGGACACAGCCAAACCAUAUC | |
| | UGUAUGUGAUUAGAUAGGAAGCUUGCUCUAAGUUGGUAGAAUGUAAUUUA | |
| | AUGCAAGAGAGUUUGAGUUGAAACAGUUUGAGAUAAAUAUGAUUUAUAUU | |
| | ACAAAUAUUUUACAGCAAACUUUUUCAAUUUGUCAUUAUUGAAAAUGUUU | |
| | CAGAUAAAAAUGAAAGAUGAAGAGUCUAUUGACUCUUUUUUCUUAAGCUA | |
| | AAAUAGACAAUACCAAUAUUAAUUUAUAUAUAGUAUGUAUGAAUGUUACU | |
| | UUUGCUUUUUGAUAUGAAAUAUAAGUCAUAUGUUACUAUAAUAAUAAGCA | |
| | CUACUGACAAAGUUUCUUCUUAAUUGUAAUCUUUACAGCAUAAUGAAUUC | |
| | AUCUUCCUACAUCUAGACAUGCAAUAAUGAAAUAUUUUAAAUACUGAAUU | |
| | UAGGAUGAAUUUGAUUUUAUAUAUGCUUAAAUUUGAAAUAACCACUUUCA | |
| | AAUUUCUCACCCAGUGAUUAUAACAAUAAAUGAUCUUUGCUAGAUAUACA | |
| | AAGGUACUUUCAAGCAAUAUUCCUUUUGUUGCUUACCACAAUUAUGAAGU | |
| | CUAAUUUCAGAAAUCUCAGAUUAAGUGGGAUAGUCAAGCAUAGUGACAGA | |
| | AUUGGUAUUUAAACCUGGACUGCUUCAAUGCCUAAUCUGUUGAGGGUUUU | |
| | UUUUUUUUUUUAUCAUGAAGGGAUGUUGGAUUUUAUUGAAGGCUUUUUCU | |
| | GCAUCUAUUGGGAUGACCAUAUGGUUUUUGGUUUUGAUUCUGUUUAUGGG | |
| | GUGAAUCACAUUUAUUUAUUUGCAUAUGUUGAACCAACCUUGCAUUCCAG | |
| | GAAUAAAGCCUACUUGAUUGUGGUGAAUAAACCUUUUGAUGUGCUGCUGG | |
| | ACCUGGUUUUCUAGUAUUCUGUUGAGGAUUUUUGCAUCUAUGUUCAUCAG | |
| | GGAUAUUGACCUGAAGUUCCCUUUUUUCAGUGUGUCUUUGCCAGAUUUUG | |
| | GUAUCAGGAAGAUGCUGGAUUUGUAGGAUGAGUUAGGGAGAAGCCCCUCC | |
| | UCCUUGACUUUUUGAAAGGGCUUUGGUAGGAUUAAUAUCAGUUCUCCUUG | |
| | CAUGUCUGGUAGAAUUUGGCUGUGAAGCCAUCUGUUCUGGGGCUUCUUUU | |
| | GGUUGGUAGUUUUUGUAGUUUUUUAAAUUACUGAUUCAAUUUGUGAACUU | |
| | UUUAUUGUUCUGUUCAGGUUUUUGCUUUCUUCCUUAUUCAAUCUACUAUU | |
| | UGACUCAGCAAUCCACUACUGGGUAUAUACCCAAAGAAAAAUAAUUAUAU | |
| | CAAAAGACAUAUACACCCAUAUGUUCAUCGCAGUGCUAUUCACAAUAGCA | |
| | AAGACAUGGAAUCAACCUAGGAGCCCAUCAGCAGAGGAUAGGAUAAAGAA | |
| | AAGUGGUACAUAUACAACAUGGAAUACGAUGCAGCCUUAAACAAGAAUGA | |
| | AAUCAUGUCCUCUGCAGCCAACAUGGAUUCAGCUGGAGACCAUUAUCAUA | |
| | AGUGACCUAAUGCAAGAACAGAAAACCAAAAACUGCAUGUUCUCACUUAU | |
| | AAGUGGGGGCUAAGCAUUUAAUACUCAUGAAAGUAAAUACAGGAAUGAUA | |
| | GACCCUGGGGACCACUAGAAGAGGGAGGGAGGGAAGAGGGCAUGAGCUGA | |
| | AGAACCAUCUGUUGGAUAUUAUGCUUUCUGCCUGGGUGACAGGGUCAUUG | |
| | GGACCACAAGCCUCAACCACAGGCAAUUUACCCAUGUAGCAAACCUGCAU | |
| | GUAUAUCCUUUAAUCCAUAAUAAAAGUUGAAAUUAAUAAAAAUAAAAUAA | |
| | AUUGUACAAAAAAACCCUUGGACUUCUAAUGCCAAAGACUACAUUUCCAG | |
| | GUAUUUAAAGUAAAUAGACUAAAAUAAUUGAUUAGAGAAUUUUAGGUGAG | |
| | AGGAAAACACCCUUUCUCUGUGGAUUAAUAAAAACCCAAUUAAUAUUCUU | |
| | UCUUUUUAUUCUCACCUCUCAUUCCUUUAUAGAGAAGAGCAAUGGAAAGA | |
| | AGAAGGGAGCAGGGAAACAUGGUCAAGGAAGGAAAGUGAUUCUCAAUCAG | |
| | GAGAAAAGGUAGCUCUCACUGGUGAAAAUUUGGUGCAGUACAACCAAAAU | |
| | ACAAAAUCCAGUUUACAAAAAAUGAAAUAUUUCAGUGACCCAUAUAUUUA | |
| | UUUUUCUGUGUUUUUCUGCAUGGGUUUGGGUUUUUUCCCUAUUAUUUCAG | |
| | AAUUGGGCUGUAGCCUGCAAGUAAAUUAAAGAACACUUGUUUUCAUUUUU | |
| | AAUUAUUGAUCAGCUGUCUCUAAGGUUCAUUUACUAUUAAUGCAGAGGUA | |
| | GAAUUGUGUUUUUUCCAUACUCUUUAGUUCUUGAUGAACCCCAUAUGGUU | |
| | CUGGUGCUCACAGCUCUUCAAUAAUUCAAGAUUAUCAUGGAAAAAUAAUC | |
| | AAGUUUUGAAAAUCUAGAUCAGUGGUUUUCAAAGUUUUUUCUCCUGUCAA | |
| | CAAUAGAAAUAUUUUUUUUCUAGUUAAAUUAUGAUCUGGACUCAAACUUU | |
| | UAAACUGUGUUUAAGUGGAGCUGCUUGGCUUUUGUAUAAGAAGGAAGGUU | |
| | UCUCCAUGACUCAAUUAACUUUCCAUCCUCUCCGGUGACCCCAGAGGUAG | |
| | CUCUUUCAAAGGUUGGGGCUCCUGUUGAACAGAAUUUGAAGUACACUGAG | |
| | AUAGAUGAAAAGCAGUUAGGAUGUAGCUCAGGCUGAGUUCUGAGAUAGAG | |
| | CUGAUCUGGGUUCAAACCAUGAACCUCACCAUCAACUAGGCUUGUUACCA | |
| | ACAGCAGGUAGCUGAACUUCUCUAAUAUCAGUUUCCUCCUCAGUAUAAGU | |
| | GGGGAGAAAAUAAUGCCCACCUCAUAAAACUGUUUUGAGGAUUGAAAUAA | |
| | UGCAUAAGAAGUAUUUGGCAUGUAUUGUUACUUGUGUCAGUUAAUAAUCU | |
| | CUUCUGAGACAUAUUCUAUAGUGAUACAAUGUUGGCAGUAUGAUGAAGCC | |
| | AUAGAGAUAAUGCUACUCAGAGUACAGACUGCUUUCUUGAUGACAGACCU | |
| | GAAUAUUUCAAAUUAUAAUCCUAGGAGGCUAUAGUUUAUGCUUUUUUCCA | |
| | ACUCUAAGAUUUGUAUAAAGACACAUAUAAAGUGUAUCCAUUUUGAAUAA | |
| | UACAUUUAAAGGGAUACUUUAUCCCCUAAGAUGCUGCACUGGUGAAAAUC | |
| | CCUAGGAUAAUGUGUAAUCUUCUUUGACAGUAUGUGCACGUAAAAUAGUU | |
| | UCACAAGUGCAAGAUGGCAAAUGUAAUCUUCCCAUGUGCAAAUAGACUUU | |
| | AUUCCAUUGAGGGUAGAGUCUCUACAGCUGAGUUUUUUAAUGCCAUGGUA | |
| | UCAUUUAUCUAAUUUUUUUUUUUUUUUUUUUUGAGAAGGAGUCUCGCUCU | |
| | GUCAGCCAGGCUGGAGUGCAGUGGCGCGAUCUCAGCUCACUGCAAGCUCC | |
| | GCCUCCCAGGUUCAAGCCAUUCUCCUGCCUCAGCCUCUUGAGCAGCUGGA | |
| | CUACAGGCGCCUGCCACCACGCCCGGCUAAUUUUUUGUAUUUUUAGUGGA | |
| | GACGGGGUUUCACCGUGUCAGCCAGGAUGGUCUCGAUCUUCUGACCUUGU | |
| | GAUCCACCCGCCUCAGCCUCCCAAAGUGCUGGGAUUACAGGCGUGAGCCA | |
| | CCACGCCCGGCCUCAUUUAUCUAAUUCUUAAUAAGCAAUCCAUUUUGCUU | |
| | UGUUUCUUCUCUCCCUCGCUUCCUUCUCUUCUUCCUUGCUUCUAUUUGGU | |
| | GCCAAACACCGCGUUUUAUUUAUGAUAUUAAAAAGUAAAGUGAGUGUGAU | |
| | GGUGGCUGGUCACCCAUUGUUUUGAAUUAAUAACAGAAAAAAAGAAAUAU | |
| | UUUAGUGGCCCAUAUGUUUAUUUUUAUGUGUUUAUGUAUGUGGUUUUGGG | |
| | GUUUUUUAGUGCCUUCUAUCCCUAGAAGUCACUUUAAUCUCAAGACUGUC | |
| | CAAAUAAACUUUUCAGCAAAAGCAUCAGGUGAGAAGUCUGGGAGAAACCA | |
| | UCCUAUAAAACAAUAUGAACAGAAUGGAGCAGUGAACACAAUGCUCCCAU | |
| | UCUUUCUCUGUCCUCCAAGCCAUCUUUCUUCUUAUAGACUCCCUGCCAUG | |
| | UGUUGCCUGGCUCAGGUUCUACAUGUUCAUCCUGCCAUAUUGGCACUGGC | |
| | UUCUUUGAAUUCUGCUCUAGUUCUGAGACGGUGGCGCUUUAUUCACUACU | |
| | AACUCCCAGGACCAGUGCAUGCUAUUCUUCAAUUUAUUGUGUAGAUUAAA | |
| | AGGUAUCUUCUUAAAAAAUGAUGCAUGCUGCUGGGAAAUACAGACACUUU | |
| | AAUUUUACUUAGAAUCUUACUUGGAAUGUGUUAGUAGCCAGAUAAACAAG | |
| | CAAGACUGACUCAGGAAAGAAGCCAGAGAAAGGGUAAGUGUGUCAAGCAA | |
| | AAGUAGACAGCAGCACCAAAUUGAAAAAAAAAAAAAUGAGAGGAGGAGAA | |
| | GAGGCUAAAGGUACAUCUCCUUUUACUUUUCUUUCUUUCUUUCUUUCUUU | |
| | UUUGUAAUUUUGCUUUAAGCUUUCCAUUCAAAUUAUCUUAUGCUUCUUGG | |
| | ACUAGCUAUUAAUAUUAGACUUAUGGUUGAUUAGCAUUUCAAAGAGAUAG | |
| | AGGCAAUGUAUGAUGAUUCUGAGUCACCUACUCCAUUGAAUGACAGCUUG | |
| | ACUAACCCAGUGACACAUACAGGUCUCAGCCACACCCCUAUCCUGAACGU | |
| | GUCUUCUCAGAAUUCUCUCCCUUAAUCUUGAUCUUUGUGUUCUUCUUUGA | |
| | CUUUCCAUUUUAUGUCUCUUUUGCCUCUUGUAAUGAAUUCUCUGUUUUCC | |
| | UAAUCUUCCUCCUUACCUCUUUCAAAGUCUGUGUAUUUCUUUCUCCCUCU | |
| | UUGUGAGUGAGCUUUCUCUCUCUCUUUUUCUCUAAUAUUUUGCAUACCCU | |
| | UAAUUCUUAUCUGUACAAGCCAUGGAUUUUGAAUUAUAUAUUUGAAAUAU | |
| | UAACUGCAGCUAUUUAAUAAAGAUUUACAACUCUAGGUUUCUGUUAAAUA | |
| | ACAAGUAGUUGAAAGUUAAAAAUUUCACAUUUUACAGGAGAGGUUUUUUG | |
| | CUAUGUAAGCCACUUCUUCUUUGGACUUUAGGUCAGAAUAUUUAAGUAGA | |
| | AAAAGAACUAUCAGUUCUAAUUUAAGCUGUUAUUUUAAUGUUAUAGACAG | |
| | UAAAUUUAAAUUAUUCAUGGCAUUAUGGAAUAUUCCUGGGUUUCCUGAUC | |
| | CUCUAGUUUUAGGCUACAGUGUUUCAUGAACUGGCUUAACUACAAAAACC | |
| | AUUAUCUAAAAUCCAUACCAAACAUUAAAAGGGCAGAAAAGGGGAGAAGG | |
| | CAUACAGACAUUGAAAAAUUCUGCACAAACUUCAGCCUGUAAGUGCUUUG | |
| | AACUCACACACAACCUUUAAUGUUUUCCUUGCAUUCUUUGAAUGAACCUC | |
| | ACUUUUCUGUUCAGAACCCUAGCAUGUCUAGGAACUUACAUUGCAUGUGC | |
| | UUAAUCAUGGAAGUGACCAUAUGUUCUUUUUAUUUCUAACUUUAUUUGGC | |
| | UCUGUCUGCCCUGACUUUUUCCUCUCUGGUCAUAAAGUUUUUAUCUUACC | |
| | AUUCAGUUUCUCCCAGAAAGCCUCUGAACCAGUCCAACUUUGUUAUUUCU | |
| | GUCUGCUCCCCGAGUCCUUGAUGGAAGUGUGGGUGAGGAUGGGGGACUGU | |
| | UUAAACUUUUCCCUUUUAGGUUACCAUCUUAUCUCCUUGCUCUCCCAGUA | |
| | UCAAUAUUCUCUCUGCUAGAGAGCAGCUUCUCAACCUACUUGGGUCCCUU | |
| | AGGGAUGUCUCUGCAUACUAAUCUUUCAGUACUUAUCUGCAAUCCAUUAC | |
| | UUACCCUCAUUAAAUACAGUUUGGAUCAUUUCCCAGAGUCAAUGGCAAAA | |
| | AUAAAAAGGAAUUUUUAGUUUAAUUAAAGACUGGCACCAUUUUUUAAUUA | |
| | AUUUUUUGACAAAUAGUAAUUGUGUAUAUUUAUGGGGUAUAAUGUGAUGU | |
| | UUUGACACAUGUUUAGAUUGUGGAAUGAUCAAAUCAGAGUGAUUAGCAUA | |
| | UCCAUUACCUCAAAUAUUUGUUAUUUCUCUGUGGUGAGAACACCUAAACU | |
| | CCUCUCUUUUAGCUAUUCUGAAAUAUCUGCUACAUUAUUAUUAACUAAAG | |
| | UCAUCUUCCUGUGCAAUGGAACACCAGAACUUAUUCCUCCUAUCUAACUA | |
| | UAACUUUGUACUUAUUGACCAACAUCUCCUCUUUUCCUGUUCACUUCCCA | |
| | ACUCCCAGCCUCUGGUAACCACCAUUCUCCUCUCUACUUCUAUGAGUUUA | |
| | ACUUUUUUAGUUUCCACAUAUAAGUGAGAUUAUACAGUGUUUGUCUCUCU | |
| | GUGUGUGGCUUAUUUCACUUAACAUAAUGUCCUCCAGGUUCAUCCAUGUU | |
| | GUUGCAAAUGACAGAAUUUCCUGUUUUUGUAAAGGCUGAAAAGUAUUCCA | |
| | UUGUGUGUGUAUAUAUAUGUAUAUGUAUAUACACACUUUAAAAUUAUUCA | |
| | UCAGUUUAUAGACAAAAGUUAUUUCCAUAUCUUGGCUAUAAUGAAUAUUG | |
| | CUGCAAUGAAUAUGGGAGUGUAGACAUCUCUUUGGCAUACUAAUUUUAAU | |
| | UCCUUUGUGUGUACACCCAGUAGUGGGGAUUGCUGGAUAAUAGGGUAAUU | |
| | GUAUUUUUACUUUUGUGAGGAACUUCCAUGCUAGUUUCCAAAGUGGCUGU | |
| | ACUAAUUUACAGUAGCAUCAAUAAUAUAAAGUCUUCCCCUUUUUUCCACA | |
| | UCCUUAACAACAUUUGUUAUCUUUCAUCUUGAUAGUAGCCACCGUAACAG | |
| | GGUGAAGUGAUAUGUCAUUGUGGUUUUAAUUUGCAUUUUACUAAUGACUA | |
| | GAGAUGUUAAGCACUGUGGGCAUUUGUAUGUCUUCUUUUGAGAAAUGUUU | |
| | AUUCAAAUUCCUUGCCCAUUUUUAAAGUUAUUUUUUUCCUUGUUAUUGAG | |
| | UAGUUUGAGUUCCCUGCAUAUUUUGGAUAUUAGCCCCUUAUCCAGCAUAU | |
| | GAUUUGCAAAUAUUUUCUCCUAAUCUGUGGGUUGUCUCUUUACUCCCUGA | |
| | AUUGUUUUCUUUGCUGUGCAGAGUUUUUUGGUUUGAUGCAAUCCCAUUUG | |
| | UCUAUUUUUGCUUUUAUUGCCUGUGCUUUUGGGGUCAUAUCCAAGAAAUU | |
| | UCUGCCCAGACCAAUAUGGGUACUCUCCCCUAAGUACUUUUUAGUAGUUU | |
| | UACAGUUUCCAGUCUUAUGUUUAAGUCCUUAAUCCAUUGUGAGUUUAUUC | |
| | UUGUAUUAGGGGUGAGAUAAGAGUCCAUUUUGGUUCUUCUGUAUGUGGAC | |
| | UUCUGUUUUCUCAACAGCAUUUAUUGAAGUGACUGUCUUUUUCUCAUUGU | |
| | GUGUCCCUAGUGCCCUUGUCAGAAAUCAAUUGACUAUUGAUGUGUGGGUU | |
| | UAUUUCUGUGCUCUCUGUCCUAUACCAUUAGUUGAGGUGUCUGUUUUUAC | |
| | GCCAAUAUCAUGCUGCUUUGCUGUUUUGAUUACUGUGGCUUUGUAUAUUA | |
| | UUUUGAAAUCCUGUAGCAUGACGACUCCAGGUUUGUCCUUUUUGGUCAAC | |
| | AUUGCUUUGGCUAUUUGGAGUCUUUUAUGAUUCCGUACAAAUUUUAUAAU | |
| | UGUUUUUUCUGGGCCAAGUGUGGUGUCUUAUGCCUGUAAUCCCAACACUU | |
| | UGGGGGGCCAACACAGGCAGAUCAUGAAGUCAGGAGUUUGAGACCAGCCU | |
| | GACCAACAUGGUGAAACCCCGUCUCUACUAAAAAUACAAAAAGUUCGCCG | |
| | GGUAUGGUGGCGUGACCUGUAGUCCCAACUACUUGGGAGGCUGAGGCAGG | |
| | AGAAUCACUUGAACCUGGGAGGUGGAGGUUGCAGUGAGCCAAGAUCACAC | |
| | CACUGCACUGGGUGACAGAGUGAGACUCUGCCUCAAAAAAAAAAAAAAAA | |
| | AAGAAAUAAUUGUUUUUUCUAUUUCUGUAAAGAAUGACAUUGGGAUUUUG | |
| | AUAAGGAUUGCAUUGAAACUGUAGGUCACUUUGGGUAAUAUGGACCUUUU | |
| | AAAAAUAUUAAUUCUUCCAGUCUAUAAACAUGGGAUAUCUUUUCAUUUGU | |
| | CAUCAAUGUUUUAUAGUUUUCAGUGUAGAGAUCUUUCACUUUAUUGGUUA | |
| | AAUGUAGUCCUAAAUAUUUUGAUUUUUUGAUGCUAUUAUAAAUAGGAUUG | |
| | UUUUCUUAUUUCUUUUUCAGACACUUUGCUGUUAGUGUGUAGACAUACCA | |
| | CUGAUUUUUGUAAGUUGAUUUAUGUAUCCUGUAACUUUACUGAAUUUGUU | |
| | UUUCAGUUCUAGUAGUUUUUUUUGGUGGAGUCAUUACGAUUUUCUUUAUA | |
| | UAAGGUCAUGUUGUCAGCAAAUGAAGAUGAUUUUACUUCAUCAUUUCCUA | |
| | UUUUGAUGCCUUUUAUUUCUUUCUCUUAUCUAAUUGUUCUGGCUAGUACU | |
| | UCGAGUGCUAUGUUGAAAAGAAGUGAUGAGAGUGGGCAUCCUUGUCUUUU | |
| | UCCUGAUCUUAAAGGAAAAGUCUUCAGCUUUUUACCAUUAAAUAUGAUGU | |
| | UAGGUGUGAAUAUUGGCAUCAUUUUCAACAAUAAAAAUGUUUUUAAAAUU | |
| | UUAUGUUGUGGCAAAAAUUGGCUAUGCAAGAUAUUUUUAUCAUUUUAUAA | |
| | AAGAUUAUGGAUCAAAAAAUAUUAAUGAAAAUAAAACAAAAUAUAUUAAA | |
| | GCUUCCUCUAUUAUCUUUAUUCAACUUAGGUUUAAAUUGUAUGAUAAAUU | |
| | AGAAAUGGAAGAUAUUAAGAAAAUAAAAGGCUUUAUAGAACUUUUGUAGA | |
| | AAUUUGAAAGAUUUGCAUAAUUUGUAUAGAGUAAAAUUGGGGACAGUUUU | |
| | CCAUGAGGUCAUAAGUACAGGAUAGGAGGGCAUUAAGGUGGUGGAAUAAA | |
| | AUUGGUACAUACUGGUAUGGGACAUAAUUACAGCAAAAUGUGUGCAGGGG | |
| | GUAGGAUUCAUUUAUUCAGUCAGUUGGACAGUCAAUUAUAUAUUUUACAA | |
| | AUUGUCUAGUUAGUGUUAUUUUGUGCCAGUCAUUAUACUAGGUUUUGGGA | |
| | UUUCAGUGGUAAAUAAAAACAGACAACAUGAAGUAUAACUGUAUAAGCAU | |
| | UCAUUGAGUAAUAACACAAUAAUUUAAUGAUUAUGUAUGUGUUUGGCAGG | |
| | AAGACAACCGAAGCCAUAGAACCACAUAGCAGGGGGUCUUGUUAUGCAGA | |
| | GUGUAGAAUCAGAGAUUUCCAUGAUGAAAUGAUAUUGAAUUAAAUAUUAA | |
| | AGUGGGAGUGAAGAGAACAUCCUUUCUGUUUUAUUUUGAGAUUGGCAACC | |
| | CUCGGCAUUCUUAAAGUUCAAGGGGAAGGAUUCAGUACCUAGGGAAUAGU | |
| | AGAACAUAUGGAGGAAAAAAAGAUAUCUGCAAGAUAUCUGAGAUGGUAGA | |
| | AAUAGGAAAUGAAGUUGUAGGAUUUUGUGGUGGGGAAGCGGGUCACAGUU | |
| | UAGUGCUUUCCUUAAGACAGGAAAAGAUACUUGUGAUUGUUUUGUAAAUA | |
| | GGCUCUUGAACAGGGAGGAAACUGGUGAAGCUAUUGCUUUAAGAAUGGUG | |
| | GCAAUAGAUUGUUGAGCGAUUGGAAUAGCUUAAGAGUGAAAGACCAGGUC | |
| | AAGUGGAAGAUAGCUGCAUCUAAGCAGUCAUUGAGUAAUAAGGUCAUGAA | |
| | UCGAGAUAGCUUAAUGUCCACGUGAAAAUUAUCUUCUAUGUUUUCUGUUU | |
| | UCGUGACAUGUUUUCACUCCUAUUUUUUUUAAAACAAAAUGCAGUUGUGU | |
| | GUAUCUCAGAAGUCCUAUUCAGUAAAAAUUUUCCCUAUACUCUCAGGAAG | |
| | AGUUUUAUUGCAACUCCCCCAGAAUCCCACAGAAUUUGAUUUCUACCUCU | |
| | UAGUGCACACUCUAUGAAACAAUGAAUUGUUUAUGUUCUUGUUACCUGAA | |
| | UAAAACUGAUAAUUUCUCAUGGGCUUGGAGAGUUGUUAUUUAUUUUUUAU | |
| | AGCAUACACAAGGCAGAAUUUGGAAAAUAUUGGACACACAAUAGAUAACA | |
| | AUUAGAUAUUGUUAUUGAUUGACUGAGUGCCUAGAUGAAGAGAAUCAACA | |
| | UUUGCAUUUUUUAUAUUUUCCACAGGUAGCCUGUCUUGUUGCUUUUCUUC | |
| | UUAGUGUAUCUUUAAGUAAAAGACUUCAUAAUUUGGAAAAUGCCAAUACC | |
| | UUUAUUGUUGAAAUCAAUUGCAUGCCUAAAGCAGACAGAUUAACUGCUUU | |
| | UCAAGACAUAGAGAAUUCAUGGUAACUGGUUUAUCUAACAGUAUUAUUAU | |
| | UCAGUUUCAGAAUAAUACAUACCAAAAUAUGUUGUGUUUUCCCAUUCUUA | |
| | GUGGCUGUUCUAACAGGUUCACCAACAACGUUGUUUACUUCUCUCUUUCU | |
| | CUCUCUUACUUUCUCUCAUGUCUCUAUAUAUCUAUAAUCUUUCUAUCUAU | |
| | CCACUGAUCUAUAAUCCCAUGUAUAUACAUAUAUGUACCCUGAAGCGAGA | |
| | UAAACAUGGAUUUAAAUCGUGUUGCCUUAAUUUAACUAUGACUCAGAAAU | |
| | GUCAUACAGUCACUGAGCCUCAGUUUCUGCAUCUGAAAAUGGUAAAUAAU | |
| | UUCUCUUAUCUUGCAGACUUUAAGACAGGAUUAGAAAUAACAUCUUGUGA | |
| | AGUAUUUAAUAAUUGGUAGACAAUUCACAGUGGCUAUUAUUUUGGUGUAU | |
| | ACUUUAUGGUACUCAUUGUUAUGUAGUUGUAUAUAGGCAUAAAUGGUUAA | |
| | UGCUAUUCAUAACUGACAAUGUAUUCUGAUCCUUUUUGGUGGACAACUGA | |
| | GAGAAAAGUCUGUGGUUUCAGAUUCUGCCCCUUUAGGAAUGGAUAAUUGA | |
| | GAGGAAGGAGCCGGGAUUCUUCAUUCCUCUCCCUCCAUUAGCAUCCAAAC | |
| | UGGAACCUUCAUGAUGGAGGAUAGGAUGGAUUCUCCUGUUAGAGAAGAUA | |
| | GUUGCACCAUCUGAACACUGGUUACUCAGGAUUCUAUGUUUAUCUUUUAA | |
| | CUUUUUCAAUGAGGACGACUAUUGUAUUGGCAGAAAGAGUGCUUUUUGAU | |
| | AUGGUUUAUGUAUAUGCCCAACUCCUAAUGCACAAACCUGUUAGUAGAGC | |
| | ACAUUCAGGAUACUCAAGCCCUGACUACUGUUGAAUAAAGAAACAAUAAC | |
| | CCUAUUUUAUUUAGAGGAACCACCUCAAAGUCUCUUGCAGUAAUGCUCAA | |
| | UUCUCUUCCCUUCCUAACUCACCAGGAAGAAGGGGGCUGGAGGCACAAAU | |
| | ACAUGUUUCUUCCCACUCCCAAAGAGAAAGGCUGUGCAGUGGGAGUAGGC | |
| | UAGAUGUUACAAUUCUUUGCUCCAUUAGGGGAUUAAAAUGACAGGUGACA | |
| | CUUCUCUUUUAUAAGCUAGGCACCUAGGAAAAAAAGGUUGCUUGUUUUGG | |
| | GUUUGCUUUAUAAUAAGAAGAAUAUGCUGAAGCACAGGGUGCUAGAAAAU | |
| | AAAAGAUGGGUAAGAGGUUUGAUGAAAGACUGGGAAUAAAAGUAGUUGCA | |
| | UUUCUAGAACAGCAUGAAAAUGUAAUCCUACAAUGUUUGAGAUUGCCAUG | |
| | GAUGAAGUUUUAAAGAAGUGACUUUGCUCAGGAAAUUAAGUUUUUGAUCA | |
| | AGGAGAGUAAAGGUUAAGAAAGUAUUUGCAAUUUGGUAUCAGGUUUAGAG | |
| | AAGACUUCAAGUGUUAUAGUAUAGAGGCCAUUUGGAAAGUCAACCCUUAG | |
| | CCUAAAGUAUGGAGAAAGGGGAGGGAGAGGAGGGCUUUUAAAAGGAAGUA | |
| | GGAAAGACAAAAUCGUAUCUUGCUCAUUUGAUAAUUUUGCCUAAAAUCUG | |
| | AUGGGACUGAUCUUAGCUUAGUGGCCCCAUCUUUUUAAAAACGUUUCAGC | |
| | CCAUCUUUUCUGGAAUUGGUAAGAUUGGAAGUGGAUAGCAGCUGGGCGUG | |
| | UCUUCAAAUGAUUUGUUGUUGAACAGAAUAAUUCCUUUUCUAGAACUAAC | |
| | CCAUACUAAGGUGUUGUAUAGAGGUGGAGUAGGGUGGUGAUAGCUAGUUA | |
| | UUUAUUGGGCAAACAUGCUAAGCAAAGUAGCUUAGAAAGUAUAAUGGCAC | |
| | AAAGAUAAACUGUUGGCUUACUUCCUGCUUAGUGAAAUAUUGUUUAUUAA | |
| | GACUCAAUUCAUAGUUGGCUUCUAUUGAUUUUUUACCAUCCAGUACUCAA | |
| | AGAUGUGCAAAAAUGUUCCAGCAUUUGCUCAAUAAUCAAAUGAUCACUUU | |
| | CUUUGUAUUGACAAUCUCUCUUGAUGUUAGUUUGUUCCACAUGUCAUCCA | |
| | AGGCUGACAAUCGUUAUAGUAGCCUCAAGUUUUUCGUCAUUACAACUUCU | |
| | UGACCUCUCUCCUUCUUUCUCUUUCUCCAACUUAAGACCCAGGUAUAUAG | |
| | AACCAUUUGCAACUUCUACAACAUACUGUCAUUGCUUAUACUUUACCCAG | |
| | UGGUUGGAACAUUCUAACUUACUUCUUCACUUGCCUCACUCUACUGAAUU | |
| | CUCAAGACGGGGCUCAAUGUCCUAUAGGAAGCAUGGCCAGUUGCAGGAUG | |
| | AAGUCAAAGAUAGCUGUCUCUGCUACGUGCUCCAGUUAGAUUUCUGUGCU | |
| | UUGUAACAGCAUUAAUCACAACAUAUAGCAUGUCAUUUUCCUGCUCCUCU | |
| | CUUUCUGGGUCAUGAAUAACUUGAGGAGGAAGAAUCUAUUUUACUUUUGC | |
| | UUUGAAAUACACACACACACACACACACACACACACAUACACACACACAC | |
| | ACACACAGAAUACCUAAUGUAUGAUUCAACAUAAUGUCUGGCUUAGUAGG | |
| | UCAUCAGUAGGUUCAAAGAAUAAAUGAAUAUAUGAAUUGCAAGUGCUUUG | |
| | CAUAAUGGAUAUGUAAUAAGUAACUGUUAAAUAAAUGUUUUCAAAGGAGU | |
| | UACUCUUCUUGAAGAAAGCAAACUUCUUGAUUCUAUUUUUAUUACAAAAG | |
| | UUUAAAGAUAUAUUUAAUGAGACAUUUUCAAAGGAAAUGCCAUAAAUGGA | |
| | GGUCAUUAAUCAUUCACUAAUUCCUUUUCAACCAACUUCAGGUGAUUGUU | |
| | UCCCCCAAAUCAAAUAAAUGUUAAAAUUAUUUGUAUAGCUGUUAAAGUGA | |
| | UUGAUAUAACUUACAUUUAAAUGGAAGAAAAGUGUUUUGAUAGUAACAUU | |
| | UUCAGCCCCAAGAUAGCAUGUUUUCCUCAUGUGUUUUCCAAAGAAAGGAA | |
| | GCUAGAUUACUAUGACUUAAUUUAUAAUAUAUUUCAACAUUGAUGGAUGA | |
| | AAAAAUAAUGAAGUGUUUAUUUACCUGAAGAAAGUAAAUUCAAGGUCCAA | |
| | UAUAUCUUAAUAUACUGAUUUAUUGCUUAUGUAAUGUAUAAUAUUAAUUA | |
| | UGUACAACUGCAUUAUACAACAUACAUAAUGGCAGUAAUUAUGUUCGUGU | |
| | GUCUGAAAUACAUUUUUGAAUGAGGUAUUUAUUUAUUGAAUUCAAAGGGC | |
| | AGAACAAUAAGUUAAAAGAAAGUAUAAGGCAUGGCCAGAGCUCGGUCCAG | |
| | UUUCCAGCAUACAACAAGCUCUCCAUAAAGCAUAAUUUCUCUUUUAAGGA | |
| | UAUUGUCCUUAAGGCAGUGUGCUGUGGUAGUGUUGAGUCAAGCAGUCUGG | |
| | ACUUAAUAAGACGUUUCCCUGGCAUUCAAAAGUUUUUGAUCUGUUAAAGG | |
| | UAGAAAAAUUUUUAUUAAAAAGACUAUUUUGUAUUAGCCAAAAGGGGAUA | |
| | UAAUCGUUGUUAAUGUAAAAAUAGAUAUGAUGUAUUACUUAAAAAUUUUU | |
| | GACUCUCUAAUAUCUUUCAAAUUUCCAACACCAACAGUAAUAUAAGUCCA | |
| | GUAAGCCAUGAAUCAAAUUGGAACUGUACUUCAGCAAUGGUGUAGUUCUU | |
| | UGCAGUGCAGUCUAUUAUGUUAAGUAGUUUCUUACCGUAUGAAAUUCAUG | |
| | UGUUCUUUUCAUAAACCUAGGAUUAUAAAAAGUCUAAUGUGAUGUGUGAG | |
| | UUUAAGGCUAUGAAUCCAGCUUUAGGGAGGUCUCAUUAAGGAAAAAGGGG | |
| | ACAGAUGGAUCCAUGUGCCUACUGUGUGUUAUAGUGCCUACUGAGUGCUU | |
| | UUGGAAUAAAAAGAUGAGUAAGUUUGAGCCUUUUAACAAUAGCUACUUCC | |
| | CUUAGAAGGAGGAAAGGAAAUUACAGAAUACCUCUUUGAAUUUUUGACCA | |
| | GUUAUAAAUUUUUUUUAAAAGUGAAAUAAAGAAGUUAACUAAUUGGAUUU | |
| | GCUUCACUAUUUCAGUCAAUCUGUGUUGAAUCUUUGAGCAAAACUGGUUG | |
| | AGCAGCUUACAUGACAGCUCUCCAAGUAAAUGGAAAAUUUCCCAAGCUCA | |
| | UGCUGGUUAGGAAACAGAAGUCCUCUUUUAAAGCAGUGCAGAACUCAGCA | |
| | GUUUGGGUUUCAUUGAACUGGCUUAGUGGUUUCAACUUAUAUAACUUCCA | |
| | UAUGGAAAGUUAAGGGGAACAUAGAAACCAAACCCUCUUAUUGUACCACC | |
| | UGAGAGCAGCUGCUCUUUCGGGGGUUUCUGGUACAUUGCCUAGGACCCUG | |
| | GAGAUCUUUUAUUUUUCCUAAAAAUCUGGAAUUCUGUCCAAAGACCAACG | |
| | AAACCAUGAAAGUCAAACUUAUGCAAACUAAUUUCUAAUGGCAGUGAGAG | |
| | GAGGAAAUCCAGUUUAAUCUCCUUUUUAAAGUGCACAAACACUUGGAACU | |
| | GUUUGACCUAACAGUCAGCAAAGGGUCCAGAGAGAACCAACACAAAACAG | |
| | GCAACAGGAUUGUGUUCUCUAGUAAAUCAUGGAUGGUGAAAAAAUUUUGU | |
| | UUUUCUUUUGAAAUAGUCUAGAGGCAAAUGAGAAUAUUAGGCUGAACACU | |
| | GUAAAUUACAGACAACUAGGAACCAUGAUUGGUAAGGACUAAAGAUGCAA | |
| | UUUUGAAACUAAAACAAACAAAAAAUUUAUGUCUCACUUGGUUAUGGGAG | |
| | GACAUUGAGAAUCAAUGAAGGUCUGUCAAGUAUUAUACUAAAUGUAUUAU | |
| | ACUAAAUGUAUUAUAUGUGCUUUGUCAUCUAAUUUUUUAUCACUUCUGUG | |
| | GGUAGGAAUUAUUUCAACCUAAUUUUUGCUUCUGAAGAAACUGACAGAGA | |
| | GACGGAAUGUGUUUCUAAAGGACUGAAAAGGGGUGAAUUUAGGAUCGAAU | |
| | CCUAGGUGUGUUUCUACCUGUUUUAAACAUACUGCUUUCUAUUUUGAGGU | |
| | GUUUAUAAUAUUUCUUUUAGGUAUAUGAAUUUACAAAUGCCAAGAGUGGG | |
| | UUGAACCAUUCUUAAAAUAUUGAUAGUUUCAUAAAAAAUAUUGUAAAAAU | |
| | CUUUACAUGCCUAAAAUUGAUUACUUCUCUGAGAAAGUUUCUACAUGAUU | |
| | GAAUUUGUGUGGCCGAAUGAAAAGACAUAUGUUUUAGAAGAGAAAAGUAA | |
| | UGAAUGAUUGAUGAUUGUGCAGUGUUUCUAUCCAGUGAUUUAGAACUCAG | |
| | CUUGUUUGAAUUGCUUUAGCAGAGGGAUCACAAGCGAUAUAUAUUUUUUA | |
| | AGUAAAUGUUUAAAACAUUGGCUAUAUCUUUAAUUAGAGAAAAAUUUCUG | |
| | GACUCACGACGAGCACAGAAAUUUGAGAAAAUUAGUGUAAUUAAAACUCA | |
| | GAUGUCCAGCAAGUUUGUAUUAUAUUUCUUUUGUGCUUCAUAAGAUGUGA | |
| | AUAAUAUUUUCCAAAUAAUUAAGACUGAAUGUUAACUCUGUGAGAAAAAG | |
| | AAUUUAUUUUUAGAAAUUUGAAUAAGAAUCUCCCUUUAAAAUCCACAUUU | |
| | CCAUGCCAUAUGUGAUCAUUUUAUGAGUAAAAUUUUACCUUUCCUAGAAU | |
| | CCAAGAUCAUUAUUAUAAACAUCAGCUACUGAGUUACUCUGUUAACUGCC | |
| | AUUGAUACAAUUUUUACAAAAUAUAAACUUGAGUAACAACUGGUCCUAGA | |
| | UUUAACAAACAGAAACAAAAAUUACCCAUUUAUUGUAAUAAUGACAUAUU | |
| | UUUAAAUCUUCUAUAACUGGAAUAAAAUAACCAGCCACUAUAUGUAUCUG | |
| | AUCCUCUGCAUUCUCAUUCCAACUGCAUGAUGAAGGUCAAACUCCUGCUC | |
| | AAUGCAUGAUCUUUGUCACGAGGUGGAGCUUACCAGGACUUAUGACUGUU | |
| | UACAAACUGACCUUUUUCUCCUUUGACCCCUAUCUUUUUCUUAGUAUAUG | |
| | UGCUGCUGAAGUAAGCAUUCUCCUUUGACUCUUUCCCUUCAUUUUAUUAU | |
| | UAUUUUUUUCAAUUUUUCUUUUCAAUUUUUUGUGGGUACUCCCUUCAUUU | |
| | UAGAAUCUCAAAGUAGCACUUAGUCACCAAAUGUCUGUUUCUUCUGUUUU | |
| | GAAGUCUAAUCUAACUCCUCUGGCUCCCCUGAGCUAAUGCUGAUUCCCAA | |
| | AGAGAAGGCACCCUUAACUCAAAGUUAGAAAUAUAAUCAAAGUCCCUAAG | |
| | UUUCCUCAAAUAUCUCUUUCUAGCAUGUCUUUCUGAACUGAGUCUUAUCA | |
| | GAAAUUUCUCCUGCAAAAAUACUUUCCUGGCUUGUACUUCCUAAUUUUAU | |
| | UCAAGAAUGUAGCAGGAAAUUCAUGAAGCAUUGAUGAAGUGUCUAUUAUA | |
| | UGGAAGAUACUCAGGUUCUUCACCACAAAGAUGGCUAAGACGCAUGCUCA | |
| | UCCCCCAAGAUGCCCAUGUUAAAGUGGGGGGCAGGGACAUAAAGAUGUAA | |
| | UAUAUAUAUAGAUGAUUGUGAAAUGAUAUAGACGAGAUUCAAUCAAAGAA | |
| | AAGAUGUUCUUGAAAAGCAAAUCUCCCACCAUGAUUAAGAGUCUGACUAA | |
| | GAAUAUGGGAAUGAACGUGAUAGGCAGUGGGCUGAGAGAUGUGCAAAUAA | |
| | AUGCUGUGUUCUAGGAACCAUGUAUAGUUAAAUAAGGCUGAGCAUAGACA | |
| | UGAGAGAGAUGGGGAGUGGAAGGAGGGCAGGCUGUAAGGGUGAGAACCAU | |
| | ACCACAAAUGAGACCAUGCUAGGGAAUCAGACUUGAUUUUACACAUGAUG | |
| | GGCUGCUUUUGGAGUGUGUUUAUUUUAGAUGAAUUAUUCUGUAGCAACAG | |
| | UGCAGAAGAGAUAUUUGAAAGGGGCAACAGUGGAGGCAGGAAAACCAGUU | |
| | AGGAAGUGAUUGUUGUCAUCUGAGCUGGAUAGGAUGAAGCUUUAGAUUGG | |
| | GUCCAUAGCGAUAGAGAUGGAGGAGAGAAAAUUUAGAGAAAUAUUUAUUA | |
| | AAUGUACGUGAUAUGGAGAGUUCUAAAUGUUUACCUUGAGCAGCAGGAAC | |
| | AGAUGCAGAUUUUGUGGGGCCUGAAAAUAAAGUAAAAUUAUUAAUUCAAA | |
| | AGCAGGUAUGAAAGUAAAUAUUUAUUUAAAAUGAGAGAAUAAAUCACAAG | |
| | GUUACACACUUUAAUAAAAUGACAAGCCACAAACCUCACAAAAUUGAGAA | |
| | AAAGAAAUGUAUUUUAUAUAAGCACAAACUCAGUAUUUCUUCAGUUCAAC | |
| | UUUCCUUUAGCCAUAUUCCAAAACUAUCUGUACUCAUUCUAAUAUCUCCC | |
| | AACGUGAAGAAAUAUGAUAGAGAUGAAAUCAGAAUUCAAAGAGAAUCAGG | |
| | AGUGAGCAAGAUACAUCCCAGAACCUUUGUUCCUGGUGGUAAAUUAAGCA | |
| | AUCAUGUCUGGCGAAAGUCAGCACUUGUUAUUUCUUAUCUGCGUAAAAUA | |
| | UUUUCCAUUUUAAACCAAGAAGACUCUGAAUUAUCGGGAAUUACAUGUUU | |
| | UUGGCCAUAAGAGUGGAAUAAUGACUGUAAUCAUUAACAGUAAGGAGUGA | |
| | GGGAGGCUACUCAAUGAGGAAAGAAAUGUGUAACAUUGCUUCACUUAGGA | |
| | AUAUUAUCCCCCUCUGCUAUUCACUCUUUUAGUGCCUUCCUGAAUAGAAU | |
| | AUCCUCCAAUAUUCAGAUACAAUGGGCUCUAGCAUACUCUUUAAGAACCA | |
| | AAAUCUUGAAAUCUAUAAUGAAUCAAUGCAGAUAAACUUUUCUGAACUUU | |
| | AAUUAGAUUUUUAUCUAUUUGAUGUCUAUGCACAGAAACAAGAUAGCAAA | |
| | ACUAAGAAUAAAUAGGAUUUUAUAAAUUGUUUUAUUUAAAGAAUAGCAAA | |
| | UAUUAACUUUAGAGUAUUAAUUCCUGUGAUUUCCUUGAUAUUUUUUAAGA | |
| | CAAUCAGUGAUUCCUAUGAGAAAUGUGGCAAGACUGGUGAAACAUGCCAU | |
| | CUUUUAAGCUUUCUGUUCUUCCUUUGAGAGACAGCCCAGCAUAGGGAUUA | |
| | AUGCAGGAACCAUGGAGUUUGACUGAUUUAGUUGGACUCCAGGCUGCUUA | |
| | CUGGUUAUAUUCUACUUAACCUUUAUUUGCCUCAGUUUCUUCAUCUGUUA | |
| | AAUAGGGAUAAAAUGACACCUACCUUACUGGGUUAUUGAGUGGAUUAUAG | |
| | GUGUUAAUAUAUGAAAAUAUCUUAGAAGCAAUGCCUGGCUUCUAAGGUGG | |
| | CUGUUAUUGUUGUUAUCCAAAGAGAAGGAAACAUAAUUUUCCUUAGACUA | |
| | GCCUAGAAGUCCCUGUACAACUGAGUCAGUCAGAUCUCCAGACUUUAUUC | |
| | CUAGCUACUAUACCAGGUAUGCUGAGCUCCAGCCCAGUGUUGCUCAGUGU | |
| | GUUCCAUAUGGAUGUUCUGAGAUAAUUUGUUAUGCCCAGUAAGUGUAGAG | |
| | CUGAAUUAAAUAUUUUAGAGGUGGCAGAAAGUUCCAUAUAGUUUUUCAUG | |
| | CUUUAGACUCAUAACUCCAAGGCUAUAUGGAUGGUCUCUGAAGAUGAUGG | |
| | GGCAAUAUCCUUUCUAUCUGUUACCGUGAGCUUUCACUGAACAUGACCAU | |
| | AAUUGACUGUGCUAAGACUUUGGCCUUUCCUACUUUUGUGGUAUAAGUUC | |
| | AGACCCUUUGAAGAAGCAGUUCAUAAAUGCAAUUAAAUAAAUUUCACCCC | |
| | AACAUUAGCUGUCCUGUCCUGACAAGGGAAGUGUUGCUUGUUUACUUAGC | |
| | ACUUGUGUCUUGUUAAUACUGGUGAUGGCCAUCUGUGGGUAUGAAGAGCU | |
| | AAUGGCUGUUAAGUGACAGACGAAUCAUUUCCACAGAGCAUGCAUACACG | |
| | UUCUUUCUUUGGAUGGCGUCUACAGUUUGUCCUUGGCAGACCAUUGCUAU | |
| | UUUCAGACUUGCUUCCAGUAUCCUCUUGUAUGUGUUGCCUCACAGUAACU | |
| | UGUCACUUCACUUAAGCAGAAAGCUCACGGUUCUCUCAUUGCUGUACCUC | |
| | CUGUACUAGCCUCUGAAUGCAAUGUUUGGGUGACUGCCAUUAUCACUUCC | |
| | UUUGGCUUUUGAUCACUAAACUUCCAUUAUCCAGGCAUCACUUGUAUUUA | |
| | UGAGUAAACUUUUCCUUUUGCACCACCCCCAUACUCCAAGUCUUAUAGAU | |
| | GAGCCAUUUCCUGACAGCUAAGGAGCAAUCAACUCCACUGUCCUCCUACA | |
| | UAAUAAUGAAUAAUCUUUUCUUGCAGUCAAUAAAACAGGCUCCCACGAUC | |
| | AUAUCCUUUUAUGACUUGGGGAUGCUGGUGAAAAAUCUUGACCAGAUAUU | |
| | AUUUGAUUUGGGAGAAUAGAGCAAUGUAAAUAUGGCAUUCAAUAUGCUUU | |
| | AAAAUAAUUAUCUGGAAGGUGUAACUUUCAUGCUAAACAUGAUUUACACU | |
| | ACAAAGAAAGUAGUCUAGGAGAAAUAAACCACGGAACUUGUGGGCAUUUU | |
| | GUAAUUGUCUAAUCUAGCUCCUUUAUUUUAUAGUUGUGGAUGCUGGGGCC | |
| | AAGUAGAGUUGACUUUCUCAAGGGCACAUAGUCAAGGAGCAGUGGAGAUG | |
| | CUGGAAUAGAGUCUUCUGAUUCACAGCCUAUUACUCUUCAUUCUCGGAUG | |
| | UUUUAUAACUGAUAAUAUCUUUGAAAAUAUCUAAAUAUUUUUGUUUGGGA | |
| | GGCUACUUGAGAUCACUUCCUUUUCACUGAUAGGUCAGAGGACACACAAG | |
| | AAGUCCACUCUUAACAUAUCAGUAAGUGAGUGAUGGAUGAAGUGAAGAGG | |
| | UAAGUGUAGACACCUCCAUUUUUAAGUUACAUUGUUGGGGAGAUGGGAAG | |
| | AAAUGCUUAAUGAAUUAGCUCUCCGUCUUUAGUCAAUCUAUCUACUAUGA | |
| | UUUAUCCAGUAAUGCAUUGGCCCCCGGAACUUGGUGCUUUUACAUCUAGC | |
| | ACAUCUCCAUAUCUUAUAUUUGAGUAAACUUUUAAAUAUUUAUUAAUUGU | |
| | UAUUCUGAGAGUGGAAAUAUCGUAAGUGUAGAAUAAGGAGAUUAGGCUCU | |
| | ACUCUAAAUUCUAUUGUGAACCUGAAUCCUAAUCAUGACAAAGUCACUAC | |
| | UCUUUGCCUCAGUUUCUUCACAUGUAAAAUUGAGGUGCUGCUUUAAAUAG | |
| | CAUCAUCUAAAAUUCAUUUCAGAUAUUGUGAAUGGAAAAGCUACAAUCUC | |
| | UGAAUGUUACAACUGUCAGGUCAGUUACCCUCAUGGAUUUCAUACAUUUC | |
| | CCAUGCCUGGUUGUUGGCAGAGGGAAAAGAGUGGGAGUGUGGUGUCUGUG | |
| | UUAGUAUUGCCAGCUGAUGGGCUUUAAAACAGGAGUAGUAUGGUUUGAGU | |
| | AACAAAAAUACCUUCUUAGGAUGCCUCACCAAAUAAUAGAGGGUGCUGAA | |
| | GAGAGUAUCUAAGUAAGAGACCUGGCUAUUUCUGGAGGUUUUUCAACUAG | |
| | ACCUACGUUUAAUAUUUAAAAACAUGAAAACUCAUGUAAUUAACAUGUAA | |
| | CUUAUUUGUAUUAAAAUUAGUAUGCUGACAUGAUAUUUUCUAAAACUGGG | |
| | CCACAUAUGCAUGGAUUUCCUAAAUAAUCCUUCAAGAGAAUAGAGCAGGA | |
| | AAUGAAGUGAUAUGCCCAUUUGCAGUGUGGUAUGGGGCUUCCUGAAUGUA | |
| | UAAAUGUGGAAGGCAGCAAGGUGGGGUUGGAUACCAGUAAUGCCAAGAAC | |
| | UUAAUUUCAGCAUUUCAACCACCGUGUACAUCCUCAAAAUGCCUUUCACU | |
| | UUAAUUUUGUAUAAAUACGAAUUGGAUCCCGGGUUACCUUUUGCUUUAGA | |
| | GAUGAAAAAAAUGUAUUUACGUUUCCCACACAACUGCUAGGAAUUAAAGU | |
| | AGUGUGAAAACUCCACACAAAUAAAUAAUACAUUUAAAACUAUUUUUAGA | |
| | AGAAUAAUUCAAAAAGACAGUAGUUUUGGGACAUAGGCAACAAAAAGUCC | |
| | CUUUUACCUAGGUUUCUUUGAUUCAGAGAUUCAGCAUACGGAUUUAUGGA | |
| | GACAGAUUAUAUCCUCAACAAAUUAAAGAAUACAGGAUAUACACUGUUGU | |
| | CUAAUAUAAUAUGAGGAAACUUUAAAAUUUAUUUCCAUGAAUUCUAUGUU | |
| | CAAUUGGAAAUAUAUGUUCAAUUGAGUAUCAGUAGAAAAAUCUAUUGUUU | |
| | UUACUAAUGACUCAGCUGCUUAAAUGAUCUAUUGUAUCGGUGGCCAGUGG | |
| | CAGGAAGGAGGCUCUGUGCAGUAUUGUUGUAACCAUGACAUUAGUGACAU | |
| | CAUUUAGCAGAAAUAGAAUUUGGGACAUUUGGAAAACAAAGCAGUGGCCU | |
| | CUUGGCUCAACUUUGUGAGAACCUAAUAAAUUCUAAGAAAGUAUAAUGGA | |
| | CAGUGUUGAUUUCUCCAUAUAUAUUUAGUGAUUUUACAUGUAUGCACACA | |
| | CACACACCUACAUACAUAAAGUAUUUCAUUUAAAUUUACCUACUAAUGUA | |
| | UGAUAUUCGCAAUGCCGUAUAGACUUUGGGAAGAAUGUUAAUCUUGUAUU | |
| | GCAAAGCCAUGCUCUACUUUAAAAGCAAUGCCUCCAGAUGUACAGCAUAC | |
| | UUAACAGGGCCAAGAAAACA | |
| 2064 | CAUACAUUUUUAAAAGAUUAAUAAAAAUAAGUCAGGUCAUUUUUUACCCA | RNA |
| | GUUAUUCCAGUUCAGGGUCUUGGGUGACCAGAGCCUGUCCUGGGAGCUCA | sequence |
| | GGGUGCAAGGUGGGAACUAACUCUGGACAGGACGUCAUCCUAUCGCAGGG | of |
| | UGCACUCACACACCCGCCCACACCCACUCAGACUGGGGCCAUUGAGACAA | SHAR |
| | GCCAGUUCACCUAGCAUGCACAGCUUCAGAAUGUGUGAGGCAACGGGAGU | ED_ |
| | GCAUGGACAGAAGCCAUGCAGACAUGGGGAGAACGUGCACACUCCACACA | 00113753 |
| | GACAGUGGCCCCGGCAGGGAAUCAAUAUUUUUUCUUGUCAAUGUUGCAAG | |
| | AAAAUAAUGUUGAAUGACAGGAAAAACAUUAUUCUAGGACCUACUGUAUU | |
| | UCUUUAUAAGUUUCUCUGAACAAACUUUGCUAGAUCAAGUUAUAUAUUUU | |
| | UUUAAGACCUUUGAUACAUAGUGCCAAAUUGCCCUCCCAUAGAAAAGGUG | |
| | UACUUGUUUAGUCAAUCUCACUGAUUUUGUAAGAGUGUGGUUUUUUCCUC | |
| | CUACUCUUACAAAUGCUGGGUGUAAGCCUUUUUUCCCAAUUGAAAGAUAA | |
| | AAAUUGGUACCUCUGUAUUUCAUUUUCCUUCGUUAAUAACAAGGUUGAAU | |
| | AUGUUUCUGUAUGCUUACAGCUAUUUAUAUUUUUUCUUUUUUGAACUGUC | |
| | UGUUUUUUCUCGCGUCCAUUUUUCUAUUGGGAUUUUUCAUAUUUUCCUUC | |
| | CUGAUUUGUAGGAACUCAUUACAUACAAAGAUGAGAUCUUCUGGGCUGUA | |
| | UUUCAGAAGUUUUAUUGUCCCGUGAGAUGUUAAUAGGUGAACUGAGGGGA | |
| | AAAAAGACUUCCAUGGUCAGAUUUAACACAUCAUUUCCUAAACUUCAUUG | |
| | ACCGUGAGGACUUUUUUCUUUUUCCUCCCAGAACACCCAUUGGCAUGGUU | |
| | CAGGACAUUGGUGUUCUGAGCACUAACAUUUGAGAAAUUGUUCUGUAAAG | |
| | GAUAUUAAUGCUUUAUCUGUUACAUAUGUGGUGGGAUUCCCCCUCCUCCG | |
| | CCAGUCAUUUGUCCUUUCCUCUACAUGAUUUUUUUUCAUACAGCUUUUAA | |
| | UUCGUGUAUUCACAUCUCUCAAUAUUUUCUUUUGUGGUAAUAUAGAAGGA | |
| | GGAACCCUGAAGUCAUACUUGUUUGCUUUGAAUCCUGGCACUGCCACUUG | |
| | UUGGGGCCUUUGGAAAAUUACCCUGUCUGUGCCUCAAUUUUACCAUGUAG | |
| | AAAAUGAGAAAAAUUAAUGUUACCAAACAAAGUGAUUGUGAGGAUUAAAU | |
| | UACUUGAUAGAAGUAAAGCACAGAGUAUUAGAUGUUGAUGAUGAUGAUGG | |
| | UGGUUUACUUUUUGGAUUAUAUAGAAAGUCUCUCUCCUUCUCUGUUGUAA | |
| | AAAAAAAAAAAAUUGCCCAUAUUUUAUUGUCAUAUUUUUACGGAAGUUAA | |
| | UUUUGAUAUGAGCUAUGGACUAAAUAAUUUUCUGUUUUCCCCAAUGCUUA | |
| | GCCAGAUUCUCCCACUGCAAUUAAUUGAUUAAUGCUCCCCUUAUCAUAUA | |
| | CUAUUACUUUCUUUUUCUGGGUCUUUCUCUUCUGCUCAGUCUAUUCUGAU | |
| | ACCAAGGCCCCUUCUUUCCUAUUCCUCUUUAGAACGUUCACAGCUACAUU | |
| | UGCCUAAAUCAAGGGCACAUGUUGGAUUCCCUCUGGGAGUUGCCCCAACA | |
| | GACCUUUGGUAGGGGAGAGGGGCCUGCAGGGUGGGAUCCAGGUGUCUCUG | |
| | ACACAGGUGAGAAAUGCGGAUCCUACAGACUGAAUUUUAACUGACGCUGU | |
| | GCCCUGUUCAUCCCCAUGUGCUGCUGAGGCUUGGUGUUGAGGGACAGCCU | |
| | GGGGACUCUCUUAGGAACAUUUAAACUCCAGUGUUGUUCAUGUUGUUCAC | |
| | CAAAUCACAGAAAAAGUGAGAUCCUCAUACUCUACCUUGUCCCUCCUCAU | |
| | UCUGCCGCGCCAGUCAAAAUGACCUCUAAAUAAGCAGAAAAGAUUUGAUU | |
| | AGGGGCAGAGGGGAUUCUAACCUGACACAUCCUAAGCUAUGGAAAGAGAG | |
| | CCAACUCGUCUCAGUUGAUAGGAAGAUUUGAUACUGGGACGCUCCAUGAA | |
| | GGUGAUACUGGAGCACCAUUGAGGAUGUUUCACUCAGAACUGAGAGUCCU | |
| | UGGGUUGCCUGUCAGGCCCAGCACAACCUUCUCCUUUUCUGCACCACAUC | |
| | AUCUCUUGCUCACUUGGUUCCAACCACAAUGGUCUCUUUGCUGUUCCUCA | |
| | AACAUGCUCCCACUUUAGGACAUUUGCACGUGGUUUUUCCUCCAGAAUGU | |
| | UCCUCCCCACAUACCCACAUAGCUUGUUCCCAUGGAAGCUUAAGGCUUUU | |
| | GUUCCAAUGUCACCUUGUCAGUGAGGCCAUCCCUGACCACUCUAUUGAAA | |
| | GCUGUGCCUGGAGAUCCUCAACCUUUCUUGCCUUAUUUUUCUCCACAGUG | |
| | CCAGUCACUGUCUGACCAUCUAUUUCUCCUCAUUGUAUUGUUGAUUGUCU | |
| | CUCUCCCCUAGAAUGUUAGCUUCGAAGAGUCUACCUUCUGUUUGGUUUCC | |
| | UGCUGUACUCUCAACACCUAGAAAAGUGCCUGGCAUAUAUAGGACUCCAC | |
| | UAUUGUUUGUAGAUAGAAGAGAAAAUGAGUGUAUCCGUCAGGCAAAGUCA | |
| | CUUGCAUGAUACUUCAUGAUGUGUCCAGGCCUAGUAACAAUAGCAUGUUU | |
| | UCUGAGAAUGUAGGCUGACUUAAAAGACUCUGGAUUUUCAAGCUAGCCUC | |
| | UACAAAUAAGAUAUCUCUAAAGUGGGGAGAAAGGCUGCUGAUAUGGUUUG | |
| | GCUGUGUUCCCACCCAAAUCUCAUCUUGAAUUGUAGCUCCCAUAAUUCCC | |
| | ACGUGUCAUGGGAGGGACCAAGUGGGAGGUAACUGAAUCAUGGGGGCAGG | |
| | GUUUUCCUGUGCUGUUCUCAUGAUAGUGAAUAAGCCUCUGACGGUUUUAU | |
| | AAAGGGCAUUUCCCCUGUACACGCUCUCUUGCCUGCUGCCAUGUAAGAUG | |
| | UCCCUUUGCUCUCCCUUCCUCCAUCUUCUGCCAUGAUUGUGAGGCCUCCC | |
| | CAGCCAUGUGGAACUGUGAGUCCAUUAAACCUCUCUCCUUUAUAAAUUAC | |
| | CCAGUCUCAGUUAUGUCUUUAUUAGCAGCAUGAGAACAGACUAAUAUAGC | |
| | CGCAUCUCUCAAAAGCGAGAACAGACAUAUGUCUGCGGUAACAUCUUUUA | |
| | UCUGAUGCCCUAGCUUCAUUCCUGAGCUGCCACAGAGCCACUCAAAAUGA | |
| | AAUUCAAAUUCAAACCACAGUGAGAUACCACCACACACCCACCAGUAUGG | |
| | CUACAAUAAAAAUGCAGAAAAUACCAAGUGUGGGCGAGGAUGGGGAGGAA | |
| | CUGAAACUCUCAUACACUUUGAAAAACUAUUUGGCAGUAUCUUCCAAAGC | |
| | UGCAUGUGCAUAUAUCAUGACCCAGCAUUUUCACUUCUGCAUACCACCCA | |
| | ACAGAAACACCUACCUAUGUCCAGCUGGAAGACAGGCAGGCACAACAUUC | |
| | ACAACAGCACUGUUUGUAAUGGCCAAAAUCUGGAGCAAAAAAUGGAGAAA | |
| | AAUAGUAAAAUGGAUUUUUUAUGUGGUAUAUUCACACAUACACUACACAA | |
| | UAUAUGAAAUGCAUGAUCUAUGACCACAUGCAAUGAUAUAGAUGUAUUGA | |
| | ACAAACAUAAUGUUGCACCAAAGUCAGACACAAAAUUGUAUAAACUAUGA | |
| | AUUUGCUUCCAUCAGUAUAAGAUCUAUAAACAGGUAAAGCUAUCCAUGCU | |
| | GCUAGAAAUCCAGAGUGACUAGAAAGGAGGAUUAAGGAAGCUUUGGGAUG | |
| | CUGGUAAUAUUCUGCUUCUUUACUGGGGUUCUGGUUACACAGGAAUAUUU | |
| | AGUUUCUGAUGAUCCAUCAAGUUGUACAUGUACAUGUGAAAAUUCCUGGG | |
| | UAUAUAAAUGUUUUGAAAACUAGGUCCAUGUAUCAGAACCACCAAUUGGA | |
| | GUUGCAGGCCACACAUUUGCUAAAGCUGUUUGUUACAAAAAGCUGAAACU | |
| | AUUCCAGGAUGCACUGCUCCAGCACUUGGGGUGGAGGUGGGUGGGAGGAG | |
| | GAGGUGGGGGUUGGGGAGGGAACCUUCUGACCCUGGCUGGGUCACACCUC | |
| | UGAGAUGCUACAAGAACGAAGAAUGGUAGGGGCCAGGUGUAGAUGGGAGA | |
| | AGGCAGCUGGUAGACAGCCUCGGCUUUCUGAGGUAUCUGAGGUCUCUGAU | |
| | GGCCUCAAGGCAAACACUGCCUCCUGUCAGGCUCAGAACAGUAAAGACUC | |
| | UCCAGCCAGCCUUCCUGAAUGCCAACAGCCACAGGACUGUGCAGGUCUAA | |
| | UUUCCAAUCAGAUAUGAAGGGAAGGAGAAUGAUCUCUGCUGAUAAACCGA | |
| | GUCUGGAAACCUUGUUAUAGAAUGCAGUAGAAAAAAAGACAGGAGAGAGG | |
| | GAAAAACAUAUGAAGCGGUUCUUAGGUAAUUUCUAAGAAGGAAGCUGCAG | |
| | CAGGAACUCUGGCUACAUACCAGAGAUCGCCCUCUUAUUUCUUUCACUUA | |
| | AUAACAUUAAACAGGAAAAGAAGGAAUGGAAAUUCAGGAACUUCAAGGUC | |
| | CCACUAGGGCACUGAGGACCAGUGUAGAGGAGGACUCAUCCUGCACCAGA | |
| | CCUAUAGGCAUGGAUUAUACCAUGCCCAUGGUGCCAAUUAAGCUUUAAGA | |
| | AUCACACUUGCUAGCAUUGGAGAGGUUAGGGGGUCGGGGAGAGGUGGUAC | |
| | CUAAAGAAGGAAAAAGACGACUAUCUGUGUUAGGCCAUUCUUGCAUUGCU | |
| | AUAAAGAAAUACCUGAGACUGGGUGAUUUAUUUAAAAAAAAAAAAAAAAA | |
| | GAGGUUUAAUUGGCUCACGAUUCUGCAGGCUUUACAGGAAGCAUGGUGCU | |
| | GGCCUCUGCUCAGCUUCUAAGAGGUUUCAGGCAACUUACAAUCAUGAUGG | |
| | AUGGUGAAGGGGGACCAGGCACAUCAUGUGGCAAAAGCAAGAGCAAGAGA | |
| | GAGAGAGGGUGCGGGGAGGGGAAGUACCACAUAUUUCUAAACAAUCAGAU | |
| | CUCGUGAGAACUCACUCACUAUGGUAAAGAUAGCACCAUGCCAUGAAGGA | |
| | UCCACCCCCAUGACCCAAACACCCCCCGCCAGGCCCCACCUCCAGCACUG | |
| | GGGAUACAAUUCAACAUGAGAUUUUGGCAGGGACAAGCAUGCAAACUAUA | |
| | UCACCAUCUGGUAACAUCCUAUGGCUAUGGAAGGGAAGGGAAUAGGCAAA | |
| | AUUGGUGGUUGAAUUUGGUUGACAACCAAAACUCAGUGGACAACCCCUUU | |
| | UUGGUAUCCCAGUGGUAGAAGCCACUUGGAGAAGGUUGGGAAGCUGAAUC | |
| | AGCCCAGGAUCUGUGUGGUCUUCAGCCUUCCAGGAAGUAGAUCAUGCUGG | |
| | ACAAAAACUUCAGACCUCAACCCACAGGAUCUAGAAAGGCCAGGAUGGAA | |
| | GAAGCCACAAGGAAAGGAGAUACUUAGAGCUCAGUGGUGCUGGUUAGGGA | |
| | GUCUUUAAGGACACUUGAGAGCCAGCACCUGUGCCCUCAUCCUGGCUUCA | |
| | GAUUCUGUGGCCUAAGUGCUAAAGCCUCCCGCCCACUCCUACAGAUGUGA | |
| | AUGAGAGUCAGGGAAAAACUGGGGGUGGGUAUGGGAGUCCGAUGAGAGAA | |
| | GAGCACAUCAAACCCAGGGUAUCUGUGAGAGGGAGCUGGAUCCAUAGGGC | |
| | CUGCUCUGCAUCUGCAAGUCCAGAUGUAAUGGCAACACACUUGGGCAGUU | |
| | ACCAUCGCUACCUAUGUGCAGAAGGCUACACAAACAGGAAGAGGAAAUAU | |
| | UCAAGCACUGGCUCGUUCAUUUUAACUCGAGAGUGUCUAAAACAGAUCCC | |
| | CAACAGCACGGAAAGUUUCAGUUUUGUAGUCAAGCAGAUAAAGAUGUGGC | |
| | UAAGGAGAGUAUUCUAAGGCAGAUGCCAAGUGUAUGCCCUCUGUGAGUGC | |
| | AAUGUGCAUUGCCCAUGGGCCUAGAGCAUUCUAGAAUAGAUAUGCAAAAU | |
| | ACAUGACCACUUAGGGAAAGUUGAGAUGAGUCACUCUUUCUAAGAGUAAC | |
| | CGUUUAAAACAUCACACUUAGUAUCUCUGAGCCCCACAGCACAUGCACUG | |
| | UGAAGAAUAAAAAUUCAGAUAACAUUUAGACUUGCAUGAACAAUUGUUUU | |
| | UUUUAAAUAGACACCAAAGGAAACUCGAACCCAAAUUCUAGAUUCAGAAU | |
| | GCCCAACACUGCUUACCAGAGACAAUGGAUUUUGGUUUAGGUUUUAAAGA | |
| | GUGAUAAGUAUCAGAUUCAGAUGCUAAGAGGUAAAAGGAGAAGACAGUUU | |
| | UGCUGCUCACUCAGUGGGUUUUCUCAGUUUUAGACAAAGGUCACAAGGGA | |
| | UCUUGGGGGCUCCAGACACUAUCGAGUAAUUGGUAAAAAGGAUGAUCAUG | |
| | AUAUCAAAUACCUGGAGUGCUAAUUUCUUUAGAAACCAAAUUAUAUAAGA | |
| | CCUUUGAGGCAUGUGAACGUUCAUCCCCAGUUCAGAACUGCCUGGAAGAA | |
| | GCAGAGUUGACAUUGUUCAUUUUUAAAUACUGUGCAAGUUCUGCUAGAUG | |
| | GCUAGCAUCAUAAUGGGGUAAGAGCAGAUCCUGAGUAGAUCUUCCCUAGC | |
| | ACUCCUUAGCUGUUUCCCAUGAACCUUAGAGAAUCAAAGACCUAUAGGCU | |
| | UAGUGGAUACUAAGAGAGAUUUGAAGAUAAACAUGCCAUUAAGGCAAAGC | |
| | CCUUCUCUGACCUGACCCAAGCAUGUCAGGCCAGAGACAGUAAGAAAAGG | |
| | CACCAGAAAAGGCAUUCCAUGGAUAAGAGAGAAGCCAGGGCCCUCCACCC | |
| | UUUUGAACAUUUUGAAAACUGAAAAGGGAAGGCCUGUAAGCAGAUGCUCA | |
| | GGGCCUUCAUGAUCUCUUUCAGCCAGGUUCUUGCACUAGUAUCAGCUGAU | |
| | CAAGUCCUUUCCCUCAGUUUAAACCAUGGACUACCGUACUGAGGGCUUAG | |
| | GAGCUGUGCUUUCUGACAUAGCAGGAAGAUAUCGGGAAGGUAGCUAAAUU | |
| | CUACUGGCAGAAGCUUAAACUAUGUGAGAUCUAAUAUCAAUAUCCUGUUU | |
| | ACAGAUCAGAGCCAUUGGCACAUAAUUAGGCAGUGAGACACCAAUUCUAG | |
| | GAGGUGUGUAUACAAGGUGGAGGGGUGAUCCACAGAAGCCUCCCCUCUGU | |
| | GCUCUCCAGAGCCAAGCAAGACAUGACAGGGAAGUAGAGGGUGGUCGUUU | |
| | CGGUUAUACAGAUGCUGCACCUCUUGAAGGAGUCAGAGGCAUGUGAGAUU | |
| | CCCAGGGUCCUAAGGGAUCUGAGUUCCUUUAUGCCAGAAAGCUUGGGCUU | |
| | UCCAAGGUAAGGCCAAUGGUAGCUCUCACUUAUGUGGCUCCGGUAAACCU | |
| | AACUGCUCCAGCCAGGAGGGACAAGAUGGAAGCUCAGCAUAGGAGGUGGU | |
| | CAAGGAAAGAAACCUAGGACCUCUGAGGUUGAACUAGACUAGUGGUUUUU | |
| | GUUUUUGUUUUUUUCAAGUAAAUUUGAAUUUGGCAUUGAGAUGGGCACAA | |
| | AUUAGAACAGCUUAAGGAUGUAUUAUUAAAAUGAGUGCUGAAAUAUUCUC | |
| | UAUGAAGACACUUUCCCCCAAGAAUACUGUGGUAUGGUUUUGAAGACCUC | |
| | AUAAGGCUUGGGAUGGAACAUAGUAUGUGAAUGUUGCAAUGCUUUCCACC | |
| | UUCUGGAAAUCUGUAACUGGAGGGCAGAAUUCUGGUGGAGGGUUCCACUU | |
| | GUAAGUCUCACCCUAAUAGUGUUGGUGGUACUUUAAAUAAUAAAUUGAAA | |
| | AAAAUUAUAUUAAUUUCUCUAAACUGAAAUUAUGAAACAUAUGUCACCAU | |
| | CCAUACCUGUGAGCAUUAUCCCUGUGCCUUUUCCUUGUCUCUCCUGGGGA | |
| | UCUCAGAGAGGCCUCCCUUGUUUUUCAAAUGAAUCAUAUAGCAGUUUAUU | |
| | CCUUGAUCUCUAGUUCCACAGUUCCUCUCCCCACUUCCCUCAGUAUCUUU | |
| | AUUUCCCUUCAAAUUUCACUUUACAGGUCUCUUCAUCUGAUCAGUGAGUU | |
| | UCUUGCCAAACAUAUUUCAAGACCUUCUGGAAGUACCUUGCCAAUAACCC | |
| | AUUGCCACAUCAUUAUUGCUAACUCUUCAUUAUUCUCCAUAUUCUCUUUU | |
| | CAAUUUCAAGGAUAACAAUAUCAAUCAGUGUGGACCUAACCUGUGCUUCU | |
| | UAAAGCCUCUCUGGACUGGGGUUUUAAAAGGAUCACACUAAACCCUUAAU | |
| | UACUCCUCUUUUCUUGUACUCCCUUCUCUGCUCUUGUCCUGGAAGAGAGA | |
| | UCAUGACAAGGGAUGAUAGCUCAUAGUGAAGGAGCCACUCCUUGGCUGGC | |
| | AAGAGGCUCUCCUAAACCACUACAAACAAUUAGUCUUAAUCCUGGCUUUC | |
| | AAAUAGAAGCACCUGGGGAGCUUUUAAAAAAAUAUGGAUGCCUGGGUCCU | |
| | AUCCCACACCAAUUAAAUCAGGAACUCUUGGGAUGAAGCCCUAGGGUUGG | |
| | UAUUUUUUAAAACUGCAGUGUGAUUCUAAUGUGCACUCAGUUUCAAAGCA | |
| | CUGUUAGGAGCUGUGGUUAGCCAUGAUCCUUUGUUGAGCAUCUAUUUGCA | |
| | GCCAGAUGUCAGCCCACACAAUCAGGGCAUAGAGGAGUAGCACAAGGAUU | |
| | CUCCAAUCAAGUUAUUCAAUUCUCCCACUCACUGCUUCUUGCCUGCUUUG | |
| | CCUCCCCCACUCUGAGCCAGGGCUCCUUUUAUUAAAGCAACUCCUAAGAA | |
| | CACAGGGACGCUCUCUACCCCUUGCAUGAACUCCUCUGCAAAUCUCUUAG | |
| | GAGUUAGCACUUCAAUCACUAUCAUUCAUUCAGAAAAUGUAAGUCACCUU | |
| | UUUUGCUUUGAGUUAAUCAUUUCCCAUUUUCCCAGGUGAUUCAGAAAGCC | |
| | AGUGCUCACUGACAAUGAGUGGGUAGACGCGUGGGCCUGCAGACCUGCCU | |
| | CGCUGUUCCAUUAACAGCAGAACACACUUCGAGAGGCAACUGACAAUGGA | |
| | GGCAACAACAACAACAACAAAAGCAGUAUUUUUCCAAUCAUAAAAAAAGA | |
| | AGUCUGUUUCUGAAAACACAGUUUGAUUUGUUUAUAUUUCAUGCAGUGUU | |
| | AAAAUGCUCAGUCGGUUCUAACCUUGUUUGCAUUAAUCCUCUUUUCGGAA | |
| | UUUGCACAUUUGUUUUCAAAGCAUUGGGUUGGAGCAGUUUGCUGCUACAU | |
| | GGAAAUCAUAUCAGCAAUCGUACUCAGAACAUGAAAUGAACCUGCACAUA | |
| | GAACCCACACAAUUUUAAUGUCUGCUAACCAACUGAUAAGCACAUAGGAA | |
| | GGGCAUACAAGAAUUAGAAUAGAGAGCCAUUGAGCCAACAAAGGUUCACU | |
| | UUCUAAGAAUCACCACCUUCUGAGGUUACUGGUUAGUACUCUCAACAGCC | |
| | AUUGCAGCAGAGGCUAAUUCAUUCAUUCACACAUUCAAGAAAUUUUUCCU | |
| | UGGACAUCUACUGUAUGCCAGGUACGAUGCUAUGAGUUAGGACUAGACUA | |
| | AGGAAUAAAACACAGUCUCAGCCCCCAGAGUCUACAGUCUUCAGCUAAUC | |
| | AUAUAAACAAAUAAUGAGCUUUGCAAAAGCUUCUCCUCUCAUUGGUAUGC | |
| | UCUUCUCCCAUCUCUUUGUCUGGCUAAAUUCUAUUCAACCUGCUAGAUCU | |
| | UGAGUAAGAUGUUUCUUUAUCUAAAAUAAGCGUCCCCAACCCCCAGGCCA | |
| | UGGACCAGCACCAGUCUGUGUCCUAUUAGAAACCAGGCUGCAUGGCUGGG | |
| | UGCAGUGGCUCACGCCUAUAAUCCCAGCACUUUGGGAGGCUGAGAUGGGU | |
| | GGAUCACCUGAGGUCAGGAGUUUGAGACCAGCCUGGCAAACAUGGUGAAA | |
| | CCCCAUCUCUACUAAAAAUACAAAAAUUAGCUGAGCGUGAUGGCAGGCAC | |
| | CUGUAAUCCUAGCUACCUGGGAGGCUGAGGCAGGAGAAUCACUUGAACCC | |
| | AGGAGGCAGCAGUUGCAGAGAUUGUGCCACUGCACUCCAGCCUGGGUGAC | |
| | AACAGCAAAACUCCAUCUCAAAAAAAAAAAAAAAAAAAAAAACAAGAGAA | |
| | GAAAAAAAACCAGGCUGCACAGCAGGUGAGCAGCAGGCCAGUGAGCAUUA | |
| | CCACCUGAGCUCUGCCUCCUGUCAGAUUAGCAGUGGCAUUAGAUUCUCAC | |
| | AAGAAUGUGAACCCUAUUGUGAACUGUGCAUGCGAGGGGUCUAGGUUGCA | |
| | CGUUCCUUAUGAGAAUCUAAUGCCUGAUGAUCUGAGGUGAAACAGUUUCA | |
| | UCCUGAAACCAUCCCUCCCCUUGCCCAUCAGUGGAAAAAUUGUCUUCCAC | |
| | AAAACUGGCCCCUGGUGCCAAAAAAGUUGGGGAUUGCUAAUCUAGAAAAU | |
| | GCUCCUUGACACCUCAAGUUAGAGUUAGGCGUCCUUUCUAGGUAUUUCCA | |
| | UAGCAACAGUGCUUACUCCUAUCUGAGGACUUUGCACUUCGUAUUGCAAU | |
| | UACUUGUUUAAUUAUUUAUAUCCUCUCACUAGGCAAUGAGCUACUUAAGG | |
| | ACAAGAGCUAUGUCAUGUCCAUCUUUAUAUCCCCAAUGACUAGCACUAUG | |
| | CCUAGCACCUAUUAGGAACUCAAUAGAUAAUUGUUGAAUGAAUAAGUGAA | |
| | UGAGUGAUUGAGGUAUUCAUAGGGUAUUAUAAGAACACAGAGAAGAGACA | |
| | CCUAAAGAUACUUCCUGGGAGAGGUAGCUUCUAGGGGAAGUUAUAAAUGG | |
| | UUAAGUCUGAAUUAUCCAGGAUUAGGCUGGUUGGACAGUAGAGAGAGACA | |
| | UUCCAAGCAGAAGGAUAGCAUGAGAAAAAGAAAGCCACAAAAAACAAAAG | |
| | AGGCAUGCCAGAAAAUGCCCAGCAACACGUGGAGAGGACACACGCUAAGG | |
| | CAGCCGUAAGGUCAUGAGGGAUGGAAGGUUCCAACCAAACCAGACUCAAA | |
| | CUCCAUUCUUCCCUUCGUUCCCAUCCAAAUAAAAGAAUGAACACACAGAU | |
| | CAGAGGAGUCCUAGGAGCUGAUCUCCAGGGUUUACAUACUGGUUACCAAC | |
| | AUAUUACAUAGUCCCUAAGUCACAAACCAUGCCAAAAACUCUUCCUUGAU | |
| | ACAAGAACUAUGUCUUACCCUGCCCUGUGAGGUUCAGUGAAUGGGACCUU | |
| | CCAGGGAAAAGGUGCCAGGUCAUCUUCUUAAUACACUCCUUGCAGAAGGU | |
| | UUCUGUCUCUCAUUACAAAUGGUGGUAAAACACCUUGUUCGCUUUGGUAG | |
| | GCCCACCUUUCCUCUGCCCAGCUUCUUCCUAAAACCUAGCUCCUUUUGUU | |
| | CAACCUGAGCAACCCUUAGGAGAGCAUGUUGCCUUAUUUCUCCUUACUCC | |
| | AUUGUUUUUUGUCUUGUUUUUUGAGAUGGAGUCUCGCUCUGUCACCCAGG | |
| | CUGGAGUUUAGUGGCACAAUCUCAGCUCACUGCAACCUCUGCCUCCCGGG | |
| | UUCAAGUGAUCCUCCUGCCUCAGCCUCCUGAGUAGCUGGGACUAUAGGCA | |
| | UGCGCCACCAUGCCUGGCUAAUUUUUGUAUUUUUUAGUAGAGAUGGGGUU | |
| | UUACCAUAUUGGUUGGCCUCGAACUCCUGACCUCGUGAUCCACCCCCACC | |
| | CCACCCCACCUCCCAAAGUGCUGGGAUCACAGGUGUGAGCCACCGCACCC | |
| | AGCCCAUUGUCUUUUAAAAUAUUAAUUUCAGUGAUUUCGUCAUUUACAUU | |
| | CAAUGCAACCAAUAUCCUAUUUAAGGUAAUUCCAGAGUUUCAGUAAAACA | |
| | UCUCUGAUUACCCACUUCAAGUAAGAAAUUCUAAGAAGAUCAGCUGAUAG | |
| | AGUUCAGUCAUUAAUUCAUUCAACAACUAUUUAACACAUCUGUGUCAAGC | |
| | ACUGUGCUGGAGUCUGGAAAUUCAAAGAUGAAUGAGAAAUGGUCUCUACU | |
| | CUUAAACUGUCUGCAGUGUGGAGGAAGUUCUAGGAUGGGGAAAUUGCUUA | |
| | UGUGGGGCAGUGCUGAGGCUACUGCUGACCUACCUAAGCCAGCACUUCAG | |
| | GUUUAUGCAGGUCCCUGAAUCAGCAAUACAAGCAUCACCUGGAAACUUGU | |
| | UAGAAAUGCACAUUCUUGGGCUCUUCGUACAAACCUACUGAAUCAGAAUA | |
| | AGAGAGUGAGGCCCAGCCACCUAGGUUUUAACAGGACCUCCCAGGAAUGC | |
| | UGAGGCUCACUUUGGUUUGGGAAUCUCUGGUCUAAGCUCUGUUCUGAAUC | |
| | ACACCAGGCCUAUAUGGAAGGUGAUUAGCCAUUCCCAGCCUUCUUCUCUA | |
| | CAAUCCCCCCUUCUUCUUUUAGGAGAUUAACAUGAAACAUCAAUCCAGAG | |
| | UGACUACCCAAAAUGAAGUAAAAAUACUAUUUUCUCACAUAAUAGCAACA | |
| | CAUGACACUGCUCCCAAAUCACAGAGACGGUUUUAUGAAGAUCAGUAUGG | |
| | UAUGGACUAAACCGACUAGAGCCACAUCAGCAUCAACACAGAGGGAUUCA | |
| | GAAAGGAUAAUAUCAUCAUUGUCUCCUGUAUUAGUCUGUUCUCACAUUGC | |
| | UAUGAAGACACACCCGGGACUGAGUAACUUAUGAAGAAAAAAGGUUUAAU | |
| | UGACCCACAGUUCCACAUGGCUGGGAGGCCUCUGGAAACUUACAAUUGUG | |
| | GCAGAAUGCAAAGGAGAAGCAAGGUACCUCUUGCAUGGCAGCAGGAAAAA | |
| | GAGCCGCAGGGGAAACUGCCGCUUGUAAACCAUCAGAUCUCGCGAGCCCU | |
| | CCCUCACUAUCACGAGAACAGCAUGGGGGAAACCGUCCUCAUGAUCCUCC | |
| | CAAUAGCCCCCAAUCACCUCCCAUCAGGACCCUCCCUCCACACGUGGGGA | |
| | UUACAAUUCAAGAUGAGAUUCAGGUGGGGACACAAAGCCAAACCAUAUCA | |
| | UCUUCAUUCUCCCCCCUGGCACUUGAGGGGAAAAAAGAAUCAUAUCAGCU | |
| | UGACUAUUCAAAAAAGAAGCAAGAGCGCCACAGUUAUUUCAGUGCAUGGG | |
| | AAAAGGGAUAAACUGAAACAAUAAACUUGAACGUUUAGGAAUAUAAAGGU | |
| | AAGGGGGAGAGAGAUAACAAUCUUGGCCUCUGAGUUCUGCAACCCUAUGG | |
| | UUGUUUUAAACAAAUGAAAGCAGAUUGCUUUCUUCCUGGAGUUCUAGUGA | |
| | AAUGUAUCUUGCCACCAGCAGACCGUUCGGAGCUCCUGGCCACAGUUUAU | |
| | UGGCUCAUUGCCACGUGUCAUUAGUGACCUAUUUUCGCUGCUGUGAAAUC | |
| | GGCCAUGUCUGAAGGCCCCCGAAUCAGCAGUUUCUCCCUCCACUCACCGG | |
| | CUCCAGGCUGGCAAAGCUGACACCAGUGCCACAGAAAAUGCAACCCGCUG | |
| | CCCUCUCCCCAAAAUGUGGGGAGAGCACGGUUUUGCUAUGAAGAUGUCGG | |
| | CUUUGACCUGAGGCUGACUUGAGAGCCCAGCUGUCAUGUCUCUUCCAAAU | |
| | AAGCUGCUGAACUUGGAAUUAUCUUGGCUGAAUAAUUAAUCAGGACUAAA | |
| | AAUAACCUCAAACUGCCUGGGCUUUGCUUAAAUCCUACACAGGUGAGAGA | |
| | AGUAGGUUUUUUUUUUAACGUAAUUGCAAAACCCAUAUUUUGAAAGGCUC | |
| | UGCACCAAAAUAUGAAAAUAAUUACCCAACAUGCCAAUUUGGGAGAUAAU | |
| | UCACAGUUAAUCUGGCUCUCUUAAAAAAAUGCCACCUUUUGAAUUUCACA | |
| | UUGACUUCAGAUUGUCAGUUCUUGGUGGAUAUGAAAAGCAGCCGAGAGUU | |
| | GUACUCAAAAUUUUCUAAGAAUACCUUCAAACACAAAUCCAUGGGGAAAA | |
| | AUAUAUCCGUUGGUAUAAAGAGCGCCUGUUACCAGGCAGAUUAGACAGUG | |
| | AGCCGAGUUCCACAAGAGGGCGCCUUCCCCAUGCUUCCUUCUCGAAGGUG | |
| | AGGGCGCUGCGUUUCCGCCCCAGCCUUGGCUGCCCUUUUUUUCCUUUGCC | |
| | CUUAUACAAACGAUGUGCUCCCAAGAGCGAAUGCUCAGUGUCCUGUGGAA | |
| | UGCUACUCCUGUGACCACUUUCUAGCUGAGAUCAUCAGGCAAAUGUUAUC | |
| | UCUGUAACAUCAGAGGAGCAACUUCAAAUGAUGAGAAAUCAAGCAAAACA | |
| | UUAAAAAUACAGGGGGAAAAAACAAAUACAUCUAAACUGCCUUCUCUCCA | |
| | UGGUGAUCUAGCUUUGUGUGUUCAUUUUCUUGAUAUUGCUGUGAUACAAA | |
| | UAGGAUGUGAUGAAAUGAAAGUACAUCCAUCACAGCAAUCUUGUGUCCAG | |
| | CCUGAAUCUCAGACCCAGAUGUGGCUCCAACCAACAAGUGACCAUGAGCA | |
| | CGGGGCCCAGGUGUAUUCUGGGAAGCUGCUCACCCUCACUGCCAUUUCUU | |
| | UCAUCCCCGUAGGCACAGCAUCACCUUACAUCGAAGACAGAUUCAACGAA | |
| | UCUGCCUCUCAUCCUAGGUGGCCACUAGGCAACUCCUCUGGGACCAUUUC | |
| | UUCCUGCUCUAUGCUCCCAUGACCUUCAUUCAUACUCCCUCUUCCCCUGC | |
| | UGGAAACCUACUUCUUUUACCUCCUCAAAGGUAAAAGGACCAGCUGGUGA | |
| | ACAAAAGAAUACAUUUGCUCUAUCUAAAGAGAAGCAUUAGAGCAAGGGAG | |
| | GAAAAACUGAUGCAAGACAAAUGACUUGGGCUCAUCAUAAAAUACUGAGC | |
| | AGUCAGCAGAACAUUAAGAAGAGACUUCUACUCCCCACCACACACAUAAC | |
| | CAUCUGCACACCUGAAUGCCGAGACUAAGCCUCACCAGACGCCAGCAGCA | |
| | UAAAUGAGAGGAGUCACUUACCCCUCUGAGGCUCAGGCUUCUCGACUGGA | |
| | AAAAAAAAAAGAUAAUAAAAAUAUCAGUUCAGUUGGGCAUAGUGGCUCAU | |
| | GUCUGUAAUCCCAGCACUUUGGGAGGCCAAGGCGGGUGGAUCACCUGAGG | |
| | UCAGGAGUUCAAGACCAGCAUGGCCAACAUGGUGAAACCUUGUCUCUAUU | |
| | AAAAAUACAAAAAUUAGCUGGGCAUGGUGGUGCAUACCUGUAGUACCAGC | |
| | UACUCAAGAGGCUGAGGCAGGAGAAUCACUUGAGCCCAAGAGGUGGAGGU | |
| | UGCAGUGAGCUGAGAUCAUUCCACUGCACUCCGGCCUGGGCAACAGAGCA | |
| | AGACUCCCUCUCAAAAACAAACAAACAAAAAAAACCUAAUGAAUUGUCAG | |
| | UCUCAAGCCAGUGGGUAGCCAGUGGGUAACCUGGUAAUGUAAUGGUUCUG | |
| | UGAAAGAGAGGGUCCAUAGAAUACAACAAAUGUGUGAUCUUGUUACUUCA | |
| | UUUGCUGUGAUGUGAGCUGAAUAAGAGUCACAAAGAAUAAGAGAAGAGCU | |
| | GUGGUUGUUGUACAGAAAUAAAUACUAUUCAUCUUGAAACUUUCACCUCA | |
| | UCCCCAGAAGUAUCCAAUAGAAUUUAUUAAUGCGUAUUUCCUACCCAGUG | |
| | UAGUCAAUCAAUGUGUAAUAAAAAUGCUGAUGGCCACAGCUUAAAUUAUU | |
| | AAAAUUCUAGCAGGUUUACCAGGUCCUGAGCUUAGAAAUGCAUGCAAAUC | |
| | UCUUCAUUUGAAUAGUUGACUUAAUAUCAUUAGUUCCCCCCUAUAUCCUC | |
| | UGGUUAGAGCUCACCUCUAAUGAAGCCUCAGGAGCUGAUGAUAUUCCCAU | |
| | ACAGUCUUGUUAGUUUUAGAGAGAAAACUCUCCCCACAACCACAAAAGUC | |
| | UUCUCCUAAGCCCUUAACCUAGAGGUGUCACAAAGAGCAUGAGGCAUCAU | |
| | CACUCCUGGGACAAUGACCCUAAAUCCUUGUCCCACUGAGAUAGUAGCCU | |
| | UAUCUUCCUGUCAAUAGGAAACCCUUGGUCAUUUGUUGUGGGCCAAGAGG | |
| | AACCUGUGGCCAGAGGACGUUAGGAGGAAAACCUGGUUUGGCAAAAAUGA | |
| | UGCAGAACAGGGACUUGCCAAAUAGUAAGGGUAAAAAGAAGAUGACUUCU | |
| | AACUGGCUAUGUGGCUGAAAGUCACCGAAAUGGGCAGUUCCACCUUGUGG | |
| | CCUUUGGCUCUCCAGAGGCAGGAAUGAGGAUAAAAAGGUAGUGGAAAUAC | |
| | CUAGAAGAUGAGACCUGAGACCAGCAGAGGCAGAGAGGUCUUUCUGGUUU | |
| | UCUAUGGGAGAGUAGCAUUCUUCAUUUCUCUCCUCUGUGCUCCCUGUGAC | |
| | UUCUGUUUAACUUCUGUCAAAGUAGUUGUGACGCCACAUCACUCUUUCUU | |
| | AUUUGUCUAUGUCCCUCAGUAAACUUCAAGCUCCACGUGGGCCAGAACCA | |
| | GGUUUAAUUUGUUCAUAAUGGUGAAUAAACUUGUAUCCCUUGAACUGAUU | |
| | ACAGCCCAAGCUCAAAAAUGUCUUAAAUGAGUAAAUGAAUGCUGCAUACA | |
| | AAGGUUAGCCCUGAAGGAGAAAUGAGCAACAUAUUCUAAUGGAGAUGUAU | |
| | GUGGCACAGAACUUGGAGAUCAAAGUCAGCCUCUUGGGUAGACUUCAGGG | |
| | AUGGGCUUUAAACAAAGAGGCAGGAAGAUCCAUAGCAUUACUUGGGGGAU | |
| | GAAUAAGACUCUAGAAUUGAGUUGGCCCAGAAAUUUUGGGUACAAGCAAC | |
| | ACUCACUUUGUUUGAUAUGAUUACAGAGUAUUUUCUUCUGUUUACUACUU | |
| | UCUUUAAUUUAAUUAUGUGAUAAAAAGUGAUCACUGUGUGUAUUAGUCUA | |
| | UUUUCAUACUGCUAUAAAGAACUACCUGAGACUGAGUAAUUUAUGAAGAA | |
| | AAAGCUUUAACUGAUUCACAGUUCCACAUGGUUGGGGAGGCCUCAGGAAA | |
| | CUUACAAUUAUGGCAGAAGAUGAAGGGAAAGCAAGGCACAUCUUACAUGG | |
| | CAGAAGGCAAGAGAGAGAGUAGAGGAAAAUACCACUUUUAAACCAUCAGA | |
| | UCUCGUGAGAACUCCUUCACUUUCACGAGUAAAGCAAGGGGGAGACCGCC | |
| | CCCGUGAUCCAAACACCUUCCACCAGGUUCCUCCCCCAACACGUGGGGAU | |
| | UACAAUUCGAGAUGAGAUUUGGGUGGGGACAGAAUCAAACCACAGCACUG | |
| | UGUAUUUCAACUACUUCCAGAGAUGAUGGGCACAUAAGGAGUAAAGAAUA | |
| | GAGGGGGGGACAAUUUCCUCCACGUGUCUGGAAGAACUUUCACAAAAACA | |
| | UACUCAUGGGUCGUUCUACUCCAAGAAGACGGAUAGCUCUUAACACAUAG | |
| | UAAAUAACUUUUCUAUCUGAAGUCUGCUUCUCUUUCUCCAAUGUAAUUGA | |
| | UUUGUAAAGGGGUUUUGCCCCACCCCCCACUCUCCUUGAUUAAGUUCAUC | |
| | CGUGAACACCAGGAGGCUGGUCUGCUCACCCCUACACAGGUGUCCUUUCU | |
| | AUUUUGUUUUUUGAGACGAAGUCUCAGCUCACUGCAACCUCCGCCUCCCG | |
| | AGUUCAAGUGAUUCUCCCACUUCAGCCUCCCCAGUAGCUGGGAUUACAGG | |
| | UGCACACCACCAUGCCUGGCUAAUUUUUUUGUAUUUUUAGUAGAAACAGG | |
| | AUUUCGCCAUGUUGGCCAGGCUGGUCUCGAACUCCUGACCUCAGGUGAUC | |
| | CACCUGCCUUGGCCUCCCAAAGUGCUGGGAUUACAGGCAUGAGCCACCAU | |
| | ACCCGGCCCAGGUAUCCUUUCUUAGAUGGGCAUUACAUCAGUCCCACUAU | |
| | CAGUCCCCAAACUAAGGUCAGUGUCUUAAGACUUGAAAGUCAAUAUGACU | |
| | AUUAGUACUACUUAAGGGGAAUAAUUGUGUGCUACUUUUGGCUUCAGUAA | |
| | GUAUUGUAGGCAUAUCACAGCAAAGGCUUUAGAGGCUUAGAGAGAAAUCG | |
| | AGAUAAUUGAGCAAAGGUGGUGACUUAAAACCAGCUCUACAAUCUGUGUU | |
| | AUUCUCUUCGCUGGAGAGAACCCUGCAAAAAGGGGCAGUUAGGAGUGAAG | |
| | CAGAUAGCCUAUGUUCUUGAACCUGUGAGCACUCACUGGUGACAUGGUUU | |
| | GGAGAGUAGAAAACUGGCCUAUGCGUCUGGACACCCAGCCGCUGUCAACU | |
| | UCAGCAAAGCAAAGUUUGGCUUCCCAGCAAGCUAAGGAGGCCUUUUCGCC | |
| | CUUGCACUUGAUGUUCCCUUAACACGGAAUGCUCUGUCCCAGACCUGUCU | |
| | AUGGCUGGCUCCUCCUUCUUCUCGGGUCUAAUCUCAAAUGCGACUUCCCC | |
| | AGAGAGGCCUUCCCAGAUAGUCCCCUCCCUGGUCAUUCUCUAUCAUGUCG | |
| | UUGUAUUUCACUCAUGGCACUCAUCACCAUCCAAAGCUGUCUUUCCAUGU | |
| | ACUUGUUUAUUUGAUUAUUCACUGUGUCCUUUUGCUCCAUAGAUAGAUAA | |
| | GAUUCAUAAAAGCAGGGCCCCUGACUCUCUUGUUUGCUACUUUAUUACAA | |
| | GCACUUCAAAUAAUGUCUGGCACAUAGUAGGACCUCUAUCACUGUGUACU | |
| | GGAUGUACGAACAAAUGAAUGAAUGAAUGAGUAGCCUGAAUAUGGGGCUC | |
| | AAGAUGGCAGUGAGAAAAGUGCUGUCCCAUCAUGAAUAGGGUAGGUUUUA | |
| | UCUCCUGAAGAGGAUAUGUGCAUUUUCUAAAGGAAAGGAGGUAGGGAACA | |
| | AGGAAGAUAUCUGUAUCAUCGGAAAAGAUCUUUUAUUCCCAUAUUGAAGC | |
| | ACCAACACGUCCUCCCCAACAUGCAUUUCUGCAUGUGGGUGACAUGCCAG | |
| | AAGGCAGGCAGGGAGGGGCAGGCAUUAAAGAACUAACAAACUCACCAAGU | |
| | UAUCACUGUGGUUUUAAAGUGGGGUGAUUAAAAAAAACAAAUGUUGGUGA | |
| | GGAUGUGGAGAAAAGGAAAUCCUAGUGUGCUGUUGGUAGGAAUGUAAACU | |
| | GGUAUAGCCCUUAUGGAAAAUUGGAUGGAGGUUUCUCAAAAAUCUAAAAA | |
| | UAGAACCACCAUAUGAUCAGGAAAUGAAAUUGGUAACUCAAAGAGAUAUC | |
| | UGCACUCCCAUGUUCAUUGUGGCAUUAUCUACAAUAACCAAGAUACCGAA | |
| | UCAACCUAAGUGUCCAAAACAGAUGAAUGGAUAAAGAAAAUGUGGUAUUU | |
| | AUACACAGCGGAAUUUGAUUUAGCUUUUAAAAAGAAGGAAACCCUGUCAU | |
| | UUAUGACAACAUGGACGGACCUGGAAGACAUUAUUUAUUUAAAUGAAACA | |
| | AGCCAAACUCAGAAAGAAAAAUACUGUAUAAUUGCACUUAUAUGUGGAAU | |
| | CUAAAAAUAGUCACACUCAUAGAAGCAGAGACAUAGUGGUUACCACGGGC | |
| | UGGGGGGAGGGAGACAUGCGGAGGUGUUGGUCAAAGGAUAUACAAUUUCA | |
| | GUUAUGAAAGAUGAAUAAGUUCUGGAGAUCUACUCUGCAACAUAGUGCCU | |
| | ACAGCUAACAAUAUGGUAUUGUAUACUUGAAAUUUUCUAAGAGAGUAGAU | |
| | CUUAUAUUGAGUGUUCUUACCACAAUAUAAUAAUAAUAACAAACGGAUGG | |
| | GAGGGAACUUUGAGAGAUGAUUAUUUAUGUCUACAGGUUUGAUGGUUUUA | |
| | UGAGUGGACACUUAUCCCCAGACUCACUGAGUUGUUUACAUUAAAUAUGU | |
| | ACAUGUUUUACAUGUUAAUCAUACCACAAUAAAAUGUAAUAGAUUAGACA | |
| | GAUAGAUAGAUAAGCAGGGUGCUUACAUACAGCUCACAAAAGGCAGAGAA | |
| | UGGCUUUGUCUUGCCGUUUGAGUGCAGUGAGAGAAUAUAAUUAAAGUGAC | |
| | CAAAAAUCCCUGGGAAUUUAUUCAAUUCUUUUGAACAAUGACCAUCCUUG | |
| | GGAAGGGAAGUCCCAUCCAUAUCAGGAAGGGGACACCAGCAAGCUUAAUC | |
| | AUCUUGCAUUUAAAUGUUUUCCAUCUAUACUUAGAGCUCAACACACAAUA | |
| | CAAACACAGCCUUCAACACUGGGACCCUCUCCACCCACAGCACGUGCCCU | |
| | CUGACCUGCUCUCCAAGCAGUGGUGGUGGCCUGCCUCUGUCCAGAAGCAC | |
| | ACCUGCCACGGCCCAGUUCUCUCUCAGUAUGUUUGGUAGAAGGAUUAAGG | |
| | GUGUCCAUCAUGGUUGCUAAACAGUACCAAGCUAGUGUCCUAUUAUAAAA | |
| | UUACUUUCACACAUAUAGGAUGCAAUGGUUCUAAUGAGGGGAAAGGCAUG | |
| | CUAAGAACAAUUACCCCCCCUUAGAUUAGCUUAGUACUUUAUAUGGUUAA | |
| | CAAAUCUCUUUUACCAAAAUCAUCUCAUUUUAAUUUCAGUCCUCAUCACU | |
| | GAAAUUCAUGUAAAAAAAGAGCAGGUGUUUUUCCAUCAUCGUUUUGUAGA | |
| | GGAGGAAUCUAAGGUCAAAACAGGUGAAUGACUUGUUCCUGGUCACAGAA | |
| | CUGGGAGGACCCAGGUCUCCUUGUCUCCAAAUACACUAUUAAAAGUCAAG | |
| | GUAAUGGGGAAAGAUCCAUGGCUGACACCCUCCUUGUUACAACUGAAUUG | |
| | CCCAUAUGUAAAGCUUUCUGCAGAUACAGAAUAACUUAUUUUAUAAUUUU | |
| | AUUGUGUUGUUGGAUCAGGAUCAAAGGCCGGACAAGCUUAUCACUGGAGG | |
| | CAAUUAUUGAAUGAUGAAAAGAAGGAAGGAGGCAAAGAAGAAACGAAGUA | |
| | AGAAAAGUCUUCCUUUUUAAGGGAUCAGGCUGGCUACACAGCACAUCCAU | |
| | AUCCUGUAUAUGAGAAUGAGAGCAGAAUAGGGACCACUACAAUUGACUGU | |
| | CACCCAGUAAGUACUAUGAGCAUAGCAGUUUGGAACUGACAUGGGCCUUG | |
| | GAGAUCAUAAUAAGCUGUGCGGUUUUGCUUGCUAAGUUACUCAUGCCCAC | |
| | UGCCACAUCAGCUGAUCUGAACUCACAUUCCCAUACACAAACAUUGAAAA | |
| | CAAAUACUUUCUGGACUAAAAAUAAAGUACACAUAAAAGUCUGUUUAAGU | |
| | GAAUCAUCCUUCCUUGGGAAGCUAAAAAUGGGUGGGAGGGGAGCAAUCUG | |
| | UAGGCUGCAGAUGGGAUGGGUGGCAGUGUGGACAGAGUCUCUCUUUGAUC | |
| | CUCUGAGAAUUCCCCAGUUGAAAAUGCUGUGGGGAGAUGAAUCCUUCUCU | |
| | CAGAAUACAGGCUGCAUCUGACCUUCCUCCUUUGAGUGUUAGCUUCUGCU | |
| | CACACACUCUGUCUCUCUGUCUCUCUCUCAUUCUCUCUCUGUCUCUCUGU | |
| | CUCUGCCUCUCUCUCUCUCUGCCUGUAAAUAACUUAUUCUGUAAUAGAAU | |
| | UGUGGCUGAGAUAGGGGAGGCUGGAAAGUCCCAGCCUGGGGUUACGCAAG | |
| | GAACUUUAUUAUUUCCAGUAAUGUUAGGAGUUGGCUAAAUGGUCUGUGAA | |
| | AGAGACUUGUCCCUUUUCCUCCUGCCUUCCAUCACAUGUUCAUUCAUUUA | |
| | UUCCCGCAUUAAUUUAUUGUGUAAACAUUCACUGAUAGUUUCUGUAGGUA | |
| | CACAUAUGAAUAAGAAAGGGUCCCUACUGUCCAGAAGCUCUACUCUUAUC | |
| | AUUUCCAGUAAUGUUAGGAGUUGGCUAAUUGGUCUGCAAAAGAGCCUUAU | |
| | UCCUUUUCCUCCUGGCUUCCAUCACAUGUUCAUUCAUUUAUUCCCGCAUU | |
| | AAUUUAUUGUGUAAACAUUCAUUGAUAGGUUCCGUAGGUACACACAUGAA | |
| | UAAAGAGUCCCUACUGUCCAGAAGCUCUACUCCAGUGAAAAGGAGCAGCC | |
| | UUUGGGAGAGAUGCAGGAAAUGAGGCUGAAGGGUGUUUGAGAAAGGGCAG | |
| | AAUGGCCUCAUAUGCCACUCUGAGGAAUUUGUGCUUGAUUCUACUGGUCA | |
| | GGUAAGGAUUUCCCAGACUUUGGUAUGGAAAACUGUAUGGAUCAGUUUUU | |
| | UAAAAGAAUUUAAUUAAAUAUUCUUGGUAUUGACAACUCAUUUUUACUAC | |
| | AUUAUUUAAAUAUAUACAAACAUAAAGCAUGUUAAAAAAAACUUCAGAUG | |
| | AAUUAAAUUUAACAGUGUUUAACUGAGCAAUAAGCAAUUUGUGAAUCAGG | |
| | CAGCCCUCGGAAGCAGAAGAGGUUCAGAGAUCUCGGUCCACAAGGUUGGA | |
| | CAGGCAGCCUUAUGGACAGGAAACAGAAGUGAGAUACAGAAACAGCUUGA | |
| | UUGGUUACAGCUCAGUGGUUGCUUUAUUUGCACAUGGUCUGAUCAGUUGG | |
| | UAGCCUGUGAUUGGCUGAGACUUUACUCCUAGUUAGGCUUUCAGUUUGUG | |
| | UGUGUACUAAGUUAGGUUGUAGUUUGUUACCUAGGCACUCAAGGUAGGGA | |
| | GGCAUUCUCAGACCAAAUUUAGUUUAACCAUGGGGUAUAACUUCCCAGUG | |
| | UGUAUACCUUAUGCAAUUAUAAAUCCAAAAGAAUUAUAAUGUAAAACCAA | |
| | UUAAAUGCAAAUUAACAAAAUUCAUUUAAUGCAACGAAUAUUACUGAAAC | |
| | AAAAUGUCUGCUGCCUAGGAAUGUGGUACUGACUGUAAGCAUGUGGAAUA | |
| | UUUUCAGUUCAGGUUGUCUCCGUGACGUGCUGAGCAAUGACUCAGUAAUG | |
| | UCACUCCUCCCUAGUCAUACUAGCUUGGAACCAACCAUUCAAAGAGGCUG | |
| | UGGUGAUGUCACAUGGCCAGCACUUCCCUUGUCUAUAUGUUUGGUUCUGG | |
| | GGUAAUUCUUUUUUUUUCUGUCACCCAGGCUGGAGUGCAGUGGAGCAAUC | |
| | UCAGCUCACUUCAACCUCCAUCUCCUGGGUUCAAGCGAUUCUUGUGCCUC | |
| | AGCCUCCCGAGUAGCUGGGACUAGAGACACAAGCCACCAUGCUCGGAUAA | |
| | UUUUUAUAUUUUUAAUAGAGACAGGUUUCACCAUGUUGGCCAGGCUGGUC | |
| | UCAAACUCCUGACCUCAGGUGAUCCACCCACCUUGGCCUCCCAAAGUGCU | |
| | GGGAUUACAGGCAUGAGCUACCAUGCCCAGCCUGUCUUCAGGGUAAUUUU | |
| | AAAUGCAAAGGCAGUUGUAAAGACAAAUCAACUGGCAGCAUUUAGUUAUA | |
| | CAAACAGUCAUCCAAUGAUCUAGAAGAUGCAUCUAUUUAAAUUUUAAACU | |
| | GUCCUUGAAAUUAAAGUAUUUUUUUUUUAAUUUCUGAUGAUACCUUCAGU | |
| | CCCAAGAGUACAUCACUGAAGCCCUUAGCAUGCAGUUUGAGGAAAUAUUA | |
| | UGUAAGUGCUAGGGUCCUGCAACAGACAGAUUUUGGGCAAGGAAGUGACA | |
| | UGAUCAGAUUUUCAUAUUAGAGCAAUUACACAAGGGGCGGUAUGAUGGAU | |
| | AGAGUAAAGGAGAGAAAAACUCAGAGUAAGGAGGCCACUUGGGAGACAAC | |
| | UACAAUAAUUUAGGCAAAGGAUGAUGAAUGAUCUAAACAAAGUCAGUGUG | |
| | AGUGAUGAGGCAUAAGAGAAUAGACUAGAAACGUUGGUAAAAGGCAGAAU | |
| | CUGUAGAACUUAGGGACUGAUUAAAUGUGGCAGGUGAAGGAGAAGGGGUA | |
| | UUUCAACCUUAGGCAACACUAUUAACCCUAGAUGGGAAUAUAAGGAAAGC | |
| | AAGUUUAAUUUCAGAUAUGGUGACUUGGGGGUGGGGAAGCUGUGAACUAU | |
| | UGGGGUGAGGCCAGUCAAAUACAGUGGGCUAGAACUGCAGAGAAAAAGCU | |
| | UCUAUGUGAGGCUAGCGUGCUAGCAUGGCUGAGUAGACACCAGCCUACAG | |
| | AGUGUAAUUUCUAGGGCCAAGAAACUCUCAUCACCCCUGCCCCCCCACCC | |
| | CCACCAAAUAAAAUGUUUCUCCUACCUACAGGUCACUACUACUCCUAUCA | |
| | UCUAACUUAAUGCUCUGAUACUUUUUUUCUUUUGGAGACAGAGUCUCUGU | |
| | UGCCCAGGUUGGAGUGCAGGGGCACAAAAUCAUAGCUCACUGCAACCUCA | |
| | AAUUCCUGGACUCAAGUGAUUCUCCUACCUCAGCCUCCCGAGUGGCUGGG | |
| | ACUACAGGUGUACACCACUCUGACCGGCUAAUUUUUUUGUAAAUUUUUGU | |
| | UUUGCAGAGACGUGGUCUCUCUAUAUUGACCAGGCUAGUCAUGAACUCCU | |
| | GGCCUCAAGCAAUCCUCCCACCUUAGCCUCCUGGAGUGCUGAGGUUUCAG | |
| | GUGAGAGCCAUAUCAAAAGAGAGUGACACUUACCCUGGGAUUGAUGUUCU | |
| | GGAUCCAGAAAUGCUCCGGUGGAAACAAUGUGGAAUUUGCACUCAUUCAG | |
| | AUCAUAAUUUAGAUUUCUGCCCUGACACUUACUAGGUAUGAAAUCCUAGC | |
| | AAAUCAUUUAUCCUCUCUAUCUUGCUUGUAAAAUGAGGUUUUAAAACCUU | |
| | UAUCAAAAGCUAGUUAGGAAUGUUAAGUAAUAUAACACAUUACAGUAUCU | |
| | AGCACAGUGCUUGCAACAUCUUGGCCAACUAAUCACGUUCAUUCUCAAAU | |
| | AUAAUGGUUAAGUACAUGGAAGAAACCAGACUUCCUGGGUUCAAAUCAUG | |
| | UCUCUACAACCUUCUACAUGACCUUACGUAAGUAAACUAACCUCUCUGUG | |
| | UCAUAAGGAGAUAAUGAUAUUCUGUAAUGCAUAGAGUUAUUGGAGCAAUU | |
| | UGUGAGUCAAUGCACAUGAAACUCAGAAUCGUUUGUCUUGCCCAUGGUAU | |
| | GUGCUAUCUAAGUGUUAGCUGCUAUUGUUGUCAUAAUUACUCCUUCCUCC | |
| | CUUCCAAUGACUAUGCUUCAGAUUCUUUCCUGGUCAUCGUUUUAAUGGAA | |
| | GGAGAGAAAGAUCAUGGCAUGCUGGGCACCUAAGCCACUGAGUGUGAAAC | |
| | UCCAUACGAGAGGGAAAAGGGGGAGUUUGAUGGCCCUAAAGGCAUUCUUU | |
| | GACUGCUUCUUAAUUUUGUCUAAGACAAAUCAGGGUCUGCACUGCCUCAG | |
| | GGAGGGAAACAUAGAGUGACUGAAGUCCAAAGCCUUGUGAUAAAAUGGAA | |
| | AGACUGUCAUCGGAUGUCUGGCCAAGAAGGCAGCUGUCCAGAUGCAGGGA | |
| | CUGUGAGUUCUUAUGAACUAUGACAACACUCACUUUCAAUGAACUUUAUU | |
| | UUUCACUUAUCAGUGGUUAAAUGCCAAAAUUACAUUGGAUUUUGCACCAA | |
| | ACUGGGAAGGGAGGGGGAACAAAAAAACAGCUCAAACUGACUUGCAUUUC | |
| | CCGAGGGCUGAGUCCUGAGAAGUUACAGCUGGGGAAGCCGGAUCAGGCGC | |
| | AUGGGCCAGUGAGCAAACACAGAUUUUUCUGAUAUAUUAAGCAUUAUUAU | |
| | GUCAAGUACCUGACCCUAAUCAACCAAGGUCAUGAACAAACUAGUCCUUU | |
| | UAACAUUUUUAUGAAAGAAACUGCUGUGUGCUUUUCUCUCUGGACUCUCU | |
| | CACUUGGAACACAGAUGUGACCCGGCUCUUCCAAGACUUCCCUCACGGAG | |
| | GCAUUAGGCCGAUGCCCUGAGCUGAGUUUUUGGUGAUUUGCUGCCUCCAC | |
| | UAGGAUCGGCGAAGAAUAUUUUAAAAUAAAUUUCAAUUUGUUUGAUCCUG | |
| | AGAGGAUGCAAUGACUUUUAGCUCAAAGUGGGACAGAGAGGCCUAUUAGA | |
| | GAUGGACACAUAAUUUUGAGGGGGUAAAAAUUUUAGCUCAUUAAACUUUU | |
| | CCCAAAUUAAAAAGCACAGAGAGGAGUGGAGUGGAAAGAGCUUCAUCUUU | |
| | GUGGUAAGAUAGAUUUUAGAUCCAAUUCCAGGUCUGUCCCCUGCACUGUU | |
| | UGAUUCAGGGCAAGUCACUUAACCCCCUGAGCUCACUGGCGUUAGCUAUA | |
| | AAAUAAUGACAGCACUACCUACCUCCUAGGCUGCCAUAAAACCCAUUACG | |
| | AUCUGACCCUGAUGGUUUCUCUCCAGCCUCAACUGUAGCCUCUCCCUCCU | |
| | GAACAGGCCUCCCUUUAAAUACCACUUCCUCUAGGAAGUCUUCUUGGAUA | |
| | UCACUUCUCCCAGUUAAAGUCUAGGUUGUGUACCCUCCUAUGAGCCCAGA | |
| | GCACCUGUGUGUAUCCCAUCAAUAAACUUAGAAACCAUCAUGUUGAUGUU | |
| | CCAGAUCACCCCUGGACUAUAAACUGUUCAAAACAAGAUCAGGCUCUUCU | |
| | AAUUGCAGGUGUCUCCAGAGCUUAAUGCAAGGCCAGACACACAUGAAGCC | |
| | UUCUAUAUGCUUUUGUAAAAUGAAUGAAGACUGGUAAACAUUGCUAUUCU | |
| | GUUGCUAUUUAUAUGGUCCUCAGAUGAAAGUUACUCCAUACGAAGUCUGA | |
| | CAUACUAAAGCAUUCUCCAGGAUGCUUUUCUGAGUUGCCAUGCCUGAUUC | |
| | UUGAUGUUGUUCUCACCACCAGACUACCCCCUUUAUUCUUUAUUCUAGAC | |
| | UCCACUUGCCCUUGAAGCUGAGACUACUGGCUUUCCUCACUGCCUACCUA | |
| | AGACACCUCAGCCAGGAUUCCAAACAAAGUUCAAUGUCUGCACUCUCCUU | |
| | GCCCUUGCAGAUCUAGCAGGGCCCCCUCAAUUCUGUCUCUGCCAAAUCCC | |
| | AUUCAAUAGGAUACACAAAAUUCACUCUGACUUGCUGUCUUUGAAAGCAU | |
| | GAAGGACGUGACAGUCUCAUUGGUCUUUACUGAAGAAAGAUCUAACCCAA | |
| | GCAUCCUCUUCUCCUACUGCCCAGGUAUGGGUCAGAUUCUUUAAGAAUAU | |
| | AUUGGGAAGGGGGAGAUUUAUUUCACAUUACUUCUCUGAAUUGGAACUUG | |
| | CUCUGAGCACCCUGUUGUUCUCCUUUCUACUUCCGUAGGCCUCUCCUCCA | |
| | UUGAUCACUAUCCAGAACUCCCAGACAAUCCCCUUAGAUGGAUACUUCUC | |
| | CCUUUUCAAGGAUUCAGACAAGAGGUUGAUGUGGUACUGGCUAUACUUCA | |
| | AUCAAGUGCCCAGACCCUUCAUUCUCCAUAGCAUCACCACAGAGGAGCAA | |
| | AAGGCAUGGGUCUCGUCUGAACAACCAGGGUAACUCAAGGAGCCAACACC | |
| | ACAUUUUCUUCUUAUGGAACUUAAAUCUGUACACAUCACCUAAAGGAAAA | |
| | UUAUCCAAAAAGGUAGACUUUCCUCAUGGGGUUUCCAUCAUGGACACAAG | |
| | CUUGUUCCUACACAGUGUCUCACAUCUCCAAAACAAUGUGUUCUUCCCAC | |
| | UCUGCAGAGUGGCAAAAACAAGAUUUGAUACCCAACUCACUACUCAGACU | |
| | UGAUCUUGACCUUGGAGCCAUUCCUUCCCUAGGGGUACAUUUCCUUAAUU | |
| | AUGCAUCAUUCAGACUAAGGAAAUUCAGAGGAGCUUCAUCAGGAAGUCAG | |
| | CAAUGGGGGAACAUCUCUAUUCCUCAGUGCAGUCCAGCCUUAUGGUAGAG | |
| | GAGUGCAGUGGCCCAAAGAAGGAAUUCUGAAAUGAAGCAACCAGGACUUG | |
| | AAGAUGUCUUCUCCCAGCUUUGUGACCUCCUCAUGUUACUUCCUGCACCU | |
| | CAGUCUCCUUUUCUGUGAUAUGGUGAUGAUUAUAGUGAGGCUUUAAAGAG | |
| | UUAACACACAUAUAGAGCACACCUUAGCAAAGAUGUGCUCCAUAAAUUUU | |
| | AUAUAUAGUUUUCCGCCAGUGUAGACAUGGCUAUUAUUUUUCUGUUUAUC | |
| | UAGCAAAUAAUCGUUGAAGCAGAUAUAUACACAUUCACAGACACCUCCUG | |
| | AGGGCAAACACUAAUUUCCAGAGACAGUAAAAUCUGGAAAUAUUUUUCUA | |
| | AAUGACUCAUGAGGAAGUCUCAAAGUGCAGUCAACACAGCAAGCUCACUC | |
| | CUGAUGAACUUUCAACCUACACAUUUUCAUUAGGUGCAAAUGGGAUUUUC | |
| | CUGCUCUCUCUGCAUUUUGGCUGAAGCCCCUAAAGUGAAAACAAUAAGUA | |
| | GCAAGCACCUCUAUCCCCAAUCCUACAGAGACCUGCUGGAUCCCAGGGCU | |
| | CACUAGAAGGUGCCCAAACUGAUCUUUCACCUCCAGAGUAUGUAAAGGAA | |
| | GACUUGAAAGUCCCCAAGAGAGCUCGUUGAAGGGAAUGCCUGAGAAUCGA | |
| | GAUCCCUUGGCUUUUCUCUCCCACUGGAGAACUUGACAUGUGUCCUUGAA | |
| | GACUUGAGGACAUAGUUGAACAGAGACCACAGCCUGCCUCAUGUUGAGAC | |
| | AAUUUCUGAGGUCAGGAACCUGCCAAGAACUGCCAAGAGGGCAGGCGAGG | |
| | ACAGAGGCAGCAGGGGAAGCAGCCUUAUUUUCCUUGGUGGGGUAGAGCAG | |
| | GAAUGCAGGGGUUCCUGCAAGCCUGGUGGACACCAUGGAAUCUAUCCUGA | |
| | AACAUCUUGAAAGGAGCCCACCUUAUAGGGUGGCCUGCCAGAGCAAGGAG | |
| | AUAUUAGCAGUGAGAAGCUGGAGUACAACCGCUAAGACAGGAGUUGGGGU | |
| | GGAAGAAGGAAAGUGGGACGCAUGGGGUCGGCUGAAGAGCAUGCACCAAU | |
| | AGCAGUAAACUAGUACAUCAGAAAAGUCCCAAUGCAUAGGAUCCACAAAU | |
| | GCACAUCAUGGAAAAGUGUAAUGAAGGGCCCAGCAUCUGGGCAAAGCCAG | |
| | CCAAGACAGAGCCACAAAGAGCACCAGAUACUUUAAAAAGGCUGCCCAUC | |
| | UUCUGUUUCCCUUUCUGCCCCACUCCCCUACCAUGGAGAAACCAAAAGCA | |
| | GCAAGGCAAAUCGGGGAGGAGGAGUGAGUCAGGAACAAGUGAAAAAACAG | |
| | ACCAUGAGACCAGACUCUCCUUUCCUAUUUUGGGAACCCCAGCAAGGGUC | |
| | AGGCCCGGGCUGUGAAAAUGAGAGAAGAUGUGAAGAGACAAAGGCUUUGA | |
| | UUUAGACUCUAUUGGGUCUUUUCGUACUUAUAGAUGAGUCAUAAUCCUCA | |
| | AUAAAAGACUCAUUUUUGUUGCUUGAACAUGAUCAGACUACAGACGCAGA | |
| | CAGGGAGGGAAGGUUGAGCACAGUAUAUUUCCAAGGUUGUCAUGGCAGAG | |
| | AAAAUGAAGUAGUUUCCUGUUCAUAGCUAUUGGGCUCAAUAUAUGCACAA | |
| | UACAUUGGUUAAGCAACACACAUGCCAAAGCAAAAUCUCAUCAGCCCCAU | |
| | CCCCCACCGACAGAGGGGUCUGAGCUGCUGAUUCUGUGAGUAUGGUACAA | |
| | ACUAACCUAAUCCUCAGCAGACAGGUCUUUGCCCUUAAGAUUGUUAUGAG | |
| | GAACUCUGAAAGUUUCUUUCUUAUACCCCUUUUCCUCCAGCCUGCUGGGC | |
| | AGAGGAGAAAGUGCCCAUCAAUCAAUCUUUAGGUCCACAGAGAUCUACCC | |
| | UAAGGAUUGAGAUCACUGCUCUUAAUGACAUUACUAGAUUGGGAGGCAAA | |
| | GUUCUCUGUCUGCCCCAGUUUCUUUCUACAGAGAGAGAAGGGACUCUUCC | |
| | AGUCACAGGGACAUUGGAUAUUUAAUGUUGGGUAGAGAAAGAGGGACCCA | |
| | AUUUAGUUGGGAAAGAAAGUAAUUUAAGAUCUUCCCCAAGAAAUAUAAAA | |
| | CUUUCUCUGAGAAGCAAAUUUAGAGAUUCAAAUGACUCCAAAGAGGACUC | |
| | AAGAAUGGAAAGAAAUGAUCCUCCCUUUCUCAAAACACUCAUAAUCAUAA | |
| | UCGUAAUCAUAACCAUAUCAUUCCAGCAAAUUUCAAGAUCUCAGCAAGGU | |
| | GGUUAGGCAUGCCCCUUUUCCUCCCUCUUUCUUAUUUUCUACUCUUUUCU | |
| | CUUCGCCCCAGGACAAAGUCAAGUCAUUUUUCAUACUUUUUUCACCUUGC | |
| | UAUUUAUUCCAUUACUCUUUGAAAGCAAGUCCCUGGGUCAACCACGUCUU | |
| | CCUUUCACAAUGACUCGGGAAAACAAUGACAAAUUCCAUGUGGAAACCAG | |
| | AGAGCCGAGAGGAAAGUGCUGGCCAUUUUCUUCCAGUUCUCCACUCUCCU | |
| | GAAAAAAGCUUAUGGCUUGGUAGAAAUUGUGAAUUCUCUUGAAAUAACCA | |
| | GAAAAAGCACAGCUGGAAUAGCAAUAUCUAAACAAAAAUGCAGCUGAUCU | |
| | GCUAAUAUUAACUAGUCUAAAAGUACCAUGAAGCAUGUGGUUUUCAUUAC | |
| | AGCAACAAAGCCACUAUAGUAUGACAAGCAGCCUGCCUUCCAAGGUUACC | |
| | CUCAUUUACAUGAUAUUGUAUUACACAUGGAGUUGGACUCUUGGGUUUAA | |
| | AGAAAAACAAGAGUUUCACAGCAAGAGGUGAAAUGAAGAUUUAGGCACUC | |
| | AGCCAAAGGUUUGAGACUACCCAGAAAUGAUCUGAGCUCACAGUCAUGUG | |
| | AUUCCUCUCUGCUCAGUACUCCAGCAGCGUGCCAUUUAGUCUCCACUCAG | |
| | GUGGAACUCUCACACAUGGCUCUUAUCACAGGUAAUUGUGUACAAGAUCA | |
| | GGGCGUCUCUUGAUCAAAACCACAUCCCAAAUAGCACCUACCACAGGUCU | |
| | UUACCAUCAACUGAGCUCGCGAUCAGCAAGACGAUGUAGUUGGAAAGGGC | |
| | AGACUUUGGAGUCCCAGAGCUGAGUUGCAAGCCCAGCCUCUGUUCCUUUA | |
| | AUGCUGUUUAAUCUUAGGCAAGUUUUCCACUUCUCCAAGCCUCAGUUUGC | |
| | UAAUCUGUAAAAAGGUUAUAGGGAGGAUUAUUACUGCUAUCAUAUUCACA | |
| | GCUAACAUUUAUGGGCAUGCUUAUAAUAUUCCAGGGACUUCAUGUUGUUA | |
| | CACGCAUUAUUCUAUUUAAUCCCCAAAAUAAUUUGAUGAGGAAACUACUA | |
| | AUAUUUUCUCCAUUUACAGAUAAGGAUACUGAGGGUCAAAGAAGCUAAGC | |
| | AGCUUGCCAAAGCUACCUGAUGAGUAAGUGGCUGAGCUGGGGUUUGACCC | |
| | UGGGUGUGACUCCUGUCAAGGCCUGUGUUCUCACUCUCUAGAUAAAGUCA | |
| | ACACUACAACAUGACUAUAACAUGCAAAUAGCAAAAUGGUUAAAGGCAAG | |
| | AGUUUCUACCACUUCCUUGUUGGCCCCUAUCUGGACUUUGGUUUCCUUGU | |
| | CUGUAAAAUGAGAGUAGUAACAGUUCCUACCUCAUAGGAUGGCUAUAAAA | |
| | AUUAAAUAACUUAAUAUGCAUAUGACCUAUGGAGUAAUACUCAGCACAUA | |
| | GUAGUUACUCUGCAAAUGUUUACCACUUUGUAUGUAUUACUAUAAAACAG | |
| | CUGACACAUAGAUGAUGAGAAAUGUGGGAAUUAAAAUAAGAAACAGAAGA | |
| | GCAUGAGAGGCCACCAAACGACCAACAGCUCUGUGGGCACCUGCAAAACC | |
| | CUCGUGGGAAACUUGCAGAGAUGACCAGAGACACUUUCUGGGGUGCUGAC | |
| | UUCCUUUGAUGCAGAGGAAGGGAUCUCAGACAUUAAGAUCUGACCAUAUU | |
| | UUACACGCCUGUUUUACAUCUGUAGCUGGUAAAACCAGGAAACAACUGGA | |
| | UAAGAAAUGUAAUGCUAAACAGAUGGAUACCUUAGGACCAAAGAGUCAGG | |
| | CUAGGGCAGUCCCCUAGUGGCCUUGUCCAGGCCCAGGCACACCCUGGAAG | |
| | CAUCACUUUUGUCUGAUGAUGUCACUACACAAAGUCACAUGGUGACCCUG | |
| | AGGCAGACAAGCCAGUUGGUGCACAGGAAUGGAGCUGACAUGCCUUGUUC | |
| | UUCAACCCCCUGAAGCAUUUUCAGAUCAUACCUAUUUCAGAAGGCUGGAA | |
| | GUGAACCCAGCAAGAGGCUUCUGUGUUGAUAAGUCUUUGUAUCAAAAUUG | |
| | ACCUGACUGGGAAUUUCUUAGCAAACUUUUCAAACAAGAGAAGGACAUUC | |
| | UCUUAGAUAUGUGAUGUGAGUGAGGAUUAAAUGACCUGAUAGAAAAUGUA | |
| | AACUACUUUUAAAUAAUUUAUGGAGUUGCUGUCAUCAUUAAAACCACAGA | |
| | GAUUUAUCAACUCUCAUUUCCGAGUAAGAUUUGAAGGAAUAGAUUUGUAG | |
| | UCUUGAGAUGGGACAGGGCACCAAGAAUGAAUACUUACGAUUCAAAGCCA | |
| | CAAACAACUUUGUCUCAGAUGGUGUUCCUAGAUUUUGCUUCCAAGUGUAA | |
| | AUUUCUGGCUAUAGCAAAGAUGGUAGCAAGUAAGUGAUCAUUUCACCUCU | |
| | UUCCAAACUCCCUACUUUUUUGCACAUGUCAGAUGCAACCUCAGGUUUAU | |
| | AACUUUAAUUUUAAUAUCCAUCUCAAGCUAACCCAGUUUCCUGGAAAUAA | |
| | AUGCCUACAAAAAGAAAAAAAACUUUUAAAGAAAAAUACAAUGAGGCUGC | |
| | UUGUGGGAAGGGAUCUCUUCCUCAAGAAGCAAUAUGCAGAAAUUACCAAA | |
| | AAAGAUGGAAAAAACAUGAAUUUAAAAUCUGACCAUAUUGAGUCUUGUUU | |
| | CCUUACUCAGUGAUUUUCAAAAUAUAGCCUUAUUUUCACAAUACUAUAAA | |
| | AGUAAUGCUGAUUAGUUACUAAAAUCUGGAUAUGAUAUAGACUUUAAUGU | |
| | ACCAAGGAGAUGACAAAAUCUUAUUUUAAAGGCUGUUGAUGAUUGCUUCU | |
| | CAGCCUUUUGGCUAAGAUCAAAUGUAAAAGCUGUUGAUGAAAUUUUUCCU | |
| | AAGAGGAAAGUGUUUUUUCCUUAGCAAAAUGCUUUGAAGAGCCAUUUGGC | |
| | UGUAAAAAAAUAAAAAAAAUAGGUUCUGAAAUAUUGUUCAGAAGGAAAAC | |
| | CAGGAAACCAGUAGUAACUUUGUUUCUCUGCAUAAUGAUGCAAGAAGAAA | |
| | AAAAUAAGUUUCUAAGGGCAGACUGAGAUGGUGGGGACAUAAGUUGGUGG | |
| | AGGAAAUAGGGAGGUAAAGAGAGAAGGCAGGAGGACCAGGUUCAGGAAAA | |
| | UGGAAUCUGGAGGCCCAGGAGAAGAGAGCUCAAGAGAAAUUCUCACUUAU | |
| | GAAAAGGGCUGGGGAUAUCUGCAUUUAGAAAUCAAUGGUGAUAUCCCAUA | |
| | UUUAGUUUUAAAGAAUUUGCUAUGCUCUGCAGCAAUGCAAUCUCCCUGUU | |
| | UUCAAAAACUCUUUGUAAAAAUUAACUACACACAAAUGCUUUCUAUAAAG | |
| | GCAUUUAGGGAAGAUAAAGGAAAAGAAGCAACUGUGUUUCAGUUUUGAGA | |
| | AAAGAAAACCACCUGAGGAUGAGAAGUGAGAUUAAGAAUUUACCAAAAUC | |
| | AGAGAACCUAGGAGAAAGUUACCACAUCCCACCCUACCCUGCCCCUGAGA | |
| | ACUUCCACAGAAAAUGAAUAGCCUCUGGGAGGCCGAGGCGGGUGGAUCAU | |
| | GAGGUCAAGAGAUCGAGAUCAUCCUGGCCAACAUGGUGAAACCCCAUCUC | |
| | UGCUAAAAAUACAAAAAUUAGCUGGGCAUGGUGGCGCAUGCCUGUAGUCC | |
| | CAGCUACUCUGGAGGCUGAGGCAGGAGAAUAGCUUGAACCCGGGAGGCGA | |
| | AGAUUGCAAGUGAGCUGAGAUCGUGCCACUGCACUCCAGCCUGGGCAACA | |
| | GAGCGAGAGUCCGUCUCAAAAAAAAAAAAAAAGAAAGAAAAGAAAAGAAA | |
| | GAAAGAAAAAAGAAAAAAAUGAAUAGCAAAGUAUCCUGAGUUUCCUUUUA | |
| | CAUAUGGAAGCCAUUUUUAUUUGAAUACUAAUAGUUGGAAUGAUCAAUGA | |
| | GGCUGGCAGAAUUGGGGAACACUGAGAAAGGAGACAUCUGGAUUACAUUA | |
| | AAUAAGUGUAAUCUCCCCUGAUGCAAAAAUCUUUCUUAUCAAAGCAAGGU | |
| | UAGGUAGCAUCACCACCUUUCCUGAAGCUGGUGCCAUUAUCAAAAUAGUC | |
| | UAGUAAUCAUUAAGAAAGCAGCUGGUGAAAUUCAAAUAUAGCUUUUAUGG | |
| | CUAGAAAAAUAGUUUUAUCUCAAAAGUGAUUACUCAGGAUGCAGCUGUGA | |
| | GAGCAUGAUUUCCUUCUUUAUGUACAGAGAAAAAUUUCCUAUGAGCUUUU | |
| | GCAGUGGCGAUGGAAAGAGGAAUGAAUCCACAAGUCCUGAAAGUCUUCAA | |
| | GUUUUUGACAAGAUGUGAUUUUAAGGGUGUGGGGGGCUGAGUUGCUCUUU | |
| | AUACCCACCUCUAUACUCUGGAAGUCAUGCCAUUUGAAGUCAGUGGGUUU | |
| | UAAAGAUUCAGGAAACACUACUCAAAGUAUCUGGCUACAGGGCUCAACUU | |
| | GCUGAGAGAGAGUAUUCCUUUCCUUAAGAUUUCUACACAUGUGAUGCAGA | |
| | AAUUGUUACACAAAGUUCUGACCAUACCUGUGUAUCAUUGUUCAGCCACA | |
| | GUCUCUUAUAGAAAAUUGUAAUGAAUUGCUUUUCAAUAUGCACCUGCAGC | |
| | AAGCUCUGAGACAAUCCUCCAGGAAGCCUUCCUUAAUCCUCCCCAGUAAG | |
| | AAGUAGGGUCCCUCCUGUGCUUGAAAUAAUUAUACAGAUGACUAGAUAAG | |
| | AGGCUUGGUGAAAUAAGCUUCUCAUAUGCACAUCUCGCUGGUGCAAAAAG | |
| | UACUUGCAGUUUUGGACCGUGAAUUGUAAGUCGUUAUAACUAGGCUCAAA | |
| | CAUGUCUUUAACCAAAAAAGGAAUCAUUACAAUCAAUAAAUUUCUGCCAG | |
| | UGAGAAAUACGUUUAUUCCUGUAGCCUAAAAAUCCAUGCUUCAGGAUUUG | |
| | ACAAACUUUUGGAGAGCAUUUUCUGCAUCCUGCUGGUUGUGGAAGCAUUU | |
| | UCCCUGCAAAAAGUUGUUGAGAUGCUUGAAGAAGUGGUAGUUUUGAAGUG | |
| | UCAUCUUCUCUUAUUCUAUGCAACAACAAUGAACCAUUUCUUGAUUGGAU | |
| | UGUGAUGUGCGAGGAAAAGUGGAUUUUAUAUGACAACCGGCGAUGACCAG | |
| | CUCAGUGUUUGGACCGAGAAGAAGCUCCAAAGCUACUUCUCAGCGAGAGG | |
| | UCAGGUGAACAUGGGAGAUGAGGCAAAACUUCGUAGCCCAAUUUGUUCAA | |
| | CUUCUGAAGCGUGGGUUGUGAUGUGCAGUCGGACAUUGUGGUGGAGAAGA | |
| | AUUGGGCCCUUCCUGUUGACCAAAGCCAGCUGCAGGCAUUGCAGUUUUUG | |
| | GUGCAUCUCAUUGGUUUGCUGAGCAUACUUCUCAGGUGUAAUGGUUUCCC | |
| | AGGGAUUCAGAAAGCUGCAGUGGAUCAGACCAGCAGCAGCCCACCAAGCA | |
| | GUGACCAGGACCUUUUUUGGUGCAAGUUUGGCUUUGGGAAGUGUUUUGGA | |
| | GCUUCUUCUCGGUCCAACCACUGAGCUGGUCAUCGCCAGUUGUCAUAUAA | |
| | AAUCCACUUUUCCUCGCACAUCACAAUCCAAUCAAGAAAUGGUUCAUUGU | |
| | UGUUGCAUAGAAUAAGAGAAGAUGACACUUCAAAACGACAAUUUUUAAAA | |
| | AAAUUUUCGGUGAGCUCAUGAGGCACCCACUUAUCAGGUUUUUCACCUUU | |
| | CCAAUUUGCUUCAAAUGCUGAAUGACCAUAGAAUGUUUCAGGGGGUGUGG | |
| | CUUCUUAGUGUCCCCAGUAUUUCAUGGAAGGCCUACUCAGGUUGGUGGUA | |
| | UUGGUGUUUACUUGUCCGGAGUGAGAUCUGUUAAAAAAACAAACAGGCAU | |
| | AUUAAAAUAUUAAGAGUGUAUUUGAGGAGACAGCAAUUCACGCAUAGGGC | |
| | AGCUCCAAGCCAGAAGUGGUCAGGGCCCUGCCAAAGAAGUGAAAGAGAAA | |
| | AGCAUUAUAGGGUGAAUGCGAAAGUGAGGCAAAGAAAAUAUUAAGUUGGU | |
| | UCAGAUCAGAUAUUGCCUUAUUUGGAUUUUCUCAGCAGAAAGUCCCUGGU | |
| | AAUAUAAUGCUCAGUUGGCUUGUGACGGGCUGAGCUGAAGUUUCAAUUUG | |
| | UUUACAUAGGAAUGCAGGGUGAUAGAGCCAUCCCAGCCUAAUGACCUCUC | |
| | AUUAAGUUAGUUUAACAAGUCCCACAAGGUUAUGGUGAGUUUGUCAGAGA | |
| | UGUUUGAACCAGAGCAGCUCCAUCUUGAAUAGGGGCUGUGUAAAAUGAGG | |
| | CUGAGACCUGAUGGGCUGCAUUCCCAAGAGGUUAAGGCAUUCUAAGUCAC | |
| | AGAAUGAGAUAAGAGGUUGGCACAAGAUACAGGCAUAAAAACCUUGUUGA | |
| | UAAAACAGGUUGCAGUAAAGAAGCCAGUUAAAACUCACGAAAACCAAGAA | |
| | GGUGAGGAGAGUGAUCUCUGGUCGAUCUCACUGCUACACUCCCACCAGCG | |
| | CCAUGACAGCUUAUAAAUGCCAUGGCAAUGACAGGAAGUUACCCUAUGUG | |
| | GUCUAAAAGGAGGAGGCAUGAAUACUCCACCCUUUAUUUAGCAUAUAAUC | |
| | AACAAAUAACUGUAAAAAUGGGCAACCAGCCUGGCUGCUCUGCCUGUGGA | |
| | GUAGCCAUUCUUUUAUUCAUUUACUUUUCUAAUAAACUUGCUUUCAUUUU | |
| | ACUUUAUGGACUCACCCUGAAUUCUUUCUUGCACAAGAUCCAAGAACCCU | |
| | CUCUUGGGGUCUGGAUCAGGACCCCUUCCCAGUAACAAGUUCUGAGUGGG | |
| | GCCCUACCCAGCCUUAUCUAAUGCCAACCGUAUCACCCUGAAAAUCCAGC | |
| | AUAACUAAUUUGUAUCAUUUGAAAAACAGCCUGUGAAAAACCAUGCCUCC | |
| | UGUAUGUAACAUCCUGGUUCUUGCGAUAUCUCGGUACCUUCCCCACAGGU | |
| | CCGUAACACAUGCUGGUCAUGUUGCUGCUGAGUAAUGGUGAUCACUCUAU | |
| | GGAUAUGCUGCGUCACCUUUACCUCUAUUGUCACAGGAGCUAGGAGGAAC | |
| | UGAGCACAGCAGGUUGGCCAGGGGCUAUGACAGCGUUCCCAUGGAAACCU | |
| | AAUUAUUCUAAUGUGUAAGAUACAUACUAUCCUAUUACAGCAUUUAGUUA | |
| | UAACAGCCUGAGAGUUGCAUUACUUUCAGAAAUGCAUGUGCCUUGUCGAU | |
| | CAAGCUGUAAGUUCCUUGAGAGCAGAAGCCACGUGUCAGUCAACUUUGUA | |
| | UCUCAAUGAAUUUUGGUUGAUAAGCAGUGGGUAAACUUUUGGUGAAGGGA | |
| | UGAAUGAAACCUGAAGGGGAUUGGUAAAUACGCCACCCCAAAAUAUGCCA | |
| | CUUUGGGAUAGGACUAUUUUGAGAUCCGACAGAUGCAGAAAGAAGUCUUC | |
| | CAAGAGCUUCUCUUUCUUAAAAAAUCUGACUCAAAUCAGAAAUUCCUGGG | |
| | AAAUGAGGACUGCCAUAAAUUGCCUCUCCAAGGGAAUUUUUAAGGCCAUG | |
| | AAGAAGACAGAAAGUCACCACUGAGAUGGACCUGAACACACACACCUUGC | |
| | CAAGAUAGCCCCUGGCUUCCACAAGAGUUCCCCAUGCAUUUACCUUCCCG | |
| | UAGUGGACUGCUCUUGAAAGCCCCAAACCCUUUUUUCUUUCUGUCAAGUC | |
| | UCCACAGUUUAUCUUUCUUUGUUUAAAAUGGUAUAUGAGCUUUUCGGCCU | |
| | AUUAGCUUGUUUGUAUGCCUUUUCUCCUGAUAAUCUGUCUUUUGUCAGUC | |
| | UAAUUUGCAGUGCUCCAGUGAAUCUAAAAGGGUAGAGGAAAAAGGGUUAU | |
| | UUGUUUCCCCUAUAAACUGAAUUAUAAAUUCCAUUACAACAGGGUCUAUG | |
| | UCAUUUUAUCUUCUUAGUACUUAACGUAAAGCAGUGUUUAAUAGGUCAGA | |
| | CGUGCUCAAUUUAGGGUAUCCAAAGGGAGCAGAAUUGUAUAUAUACAUAU | |
| | AUAUUUCAUGUGCAAUAUUUACAAUAUAUUUAUAUUCAUAAUAUAUACAA | |
| | UAUUGCAAAAAUCCUAAUAGAAGCUAUAACAUUAUUCUAAAGAUUGCUGU | |
| | UCAUAGCAGGGAUUAUAUCAGUCUGUGUAGAAAGCUGUUUUUAGCAAAUG | |
| | AUAAGCAAUUCCUUUAUAUGUGUUGAUUUACUUCCUAUGGCAAAAACAAA | |
| | UAAUAUAUAAAUAUUAUAUUAUAUAUAAAUAUAAAUAAAUUCCUUAUUAU | |
| | UUAGCAACUGUGAUGUUUUUGUAAAGAAAAUCUUUCACAUAGAAAAAAAU | |
| | AAAAGCUCUUCCUGUUCUUGGUGGUAAAUAGUAUGGAAACCAGUGCAGUG | |
| | CAAUUCAAUUUCAAAGAAUUAAAUAUCACUAAAACUUGUUUAUUUAUUUU | |
| | UUUAUUUUUGAGACAGGGUCUCACUGUGUCACCCAGGCUGGAGUGCAGUG | |
| | GCACAAUCAUAGCUCACUGCAGCUUCAACCUCCCACGCUCAAGCCACCCU | |
| | CCCAUCUCAGCCUCCCAAGUAGCUGAGUUUACAGGAAUGCGCCACCACAU | |
| | GCAGAUAAUUUUUGUAUUUUUUGCAGAGACAGGGUCUCACCAUAUUGCCC | |
| | AGGCUGGGCUUGAACUCCUGAUCUCAAGUAAUCUGCCCACCUCAGCCUCC | |
| | CAAAGUACUAACUCUUAUUAAAUGUUGUGGUCAGAACAACUCUGUCCUUA | |
| | GUUAUAUGGAAGUGACCUGCAGCAGGUGAUGGAGAAGAAUCAGAAGACUG | |
| | ACUAAGCAACUUUCAGUUACUUCAUAUGGAUUUCACAUUGGUGGAAAAGC | |
| | AGGAACAAAAAGAAGUCUUGAUUCAUGCACAGUUGAUAGCAGGAGACCAU | |
| | UUACUGGCCCUCAUGAGAUCCUCCCUGGAAGAGGAUCAAUAUCAAGGGUG | |
| | AAUGAUUCCUAUUUCUUCACUUCCUGUUUGUUCAACCAGAAAUUUCUACG | |
| | UAUGUUGUUGUAUUCCUCAGGACACUUCCAAUUUCAAGUGACAAAAACCC | |
| | AACUCAAACUAAUUUGACACAAAAGGGAAUGUACUGGCUCUUACAACUGA | |
| | AAAGUUGAAAAGUCGGUUCUAGUUCAGGUAUGGCUGGAUCCAGGACAUCA | |
| | GAUGAUGUCCUUAAGAUGCACUUGCUCUACCUUCAUCUUCAGGCUCUGCU | |
| | UCCCUCUCCCUAAACAAAGUUUCUACACUGGGCAGUGCAAAGUAUCUCUG | |
| | CAUCUUCAUGUUUAAAUGGUUCUUUGAUCCCACAAUCUUCAGAAUGACUC | |
| | UCUCAGUGCAGCCCCACAUCAAGGACUCUGAAAUGACAAUGAAUGCCUCU | |
| | GCUUGGGUUAGAUGCCCACUACAGGACACAUCACUAUAUUGGGGAGGAUG | |
| | AGGCAUGAUUGUCCAAUCUGGCUCAAAUGCUCAGUCGUCUGGGAAAAUGG | |
| | CCAUGUGUGUGACCGCUCCACAGACAUGAGAGGCUGGGAUUUCCAACAGA | |
| | AAGAUGCUAGGAAGACAGAAGAGUUGCUUAUGCCCUAAGAUCAAGAUCUG | |
| | UGUAGAGUGUCCCCUCAACCACCCAAAUCACAACCUCCCCAUAUAAGGCC | |
| | UAAUCGGAUGUUUUUUGUUGUUGCUUUUGUUUUUGUUUUUUGUUGUUUUG | |
| | UUUUGUUUUGUUUUGUUUUAGAUGGAGUCUCACUCUGUUGCCAUGCUGGA | |
| | GUGCAGUGGUGCGAUCUUGGCUCACUGCAACCCCCACCUCCCAGGUUCAA | |
| | GCAAUUAUCCUGCCUCAGCCUCCCGAGUAGGUGGUAUUACAGCCACGUGC | |
| | CACCAUGCCCAGCUAAUUUUUGUGUUUUUAGUGGAGACGGGAUUUCAUCA | |
| | UGUUGGCCAGGCUGGUCUCAAGCUCUUGACCUCGUGAUCCACCCGCUUCG | |
| | GCCUCCCAAAGUGCUGGGAUUACAGGCGUGAGCCACCUCGCCCAGCCCUA | |
| | AUCAUAUGUUUUUAAGCAAAAGGCCUAAAAAGCUUCCUCCUAGGUUCUGU | |
| | UCAAAACUGAAACAAAACAAAGCAAAAAAUAAAAAUAAUAAUAAUAAUGA | |
| | UUGAGGAAGCCAUGAGAUUCCAGGCACUAUAUUAAGUUUAAAGGCUUCCA | |
| | AAUGUUCAACUUCUAAUGAAUGAUUCACUUCACCUCAAUGCCUCUGUUUU | |
| | AGCAAAAAGCACCUGUUCUUUAAAACAGAUUUACCUCUUCAGCUGAGAUA | |
| | GAAAUUCUAAGAUAGAAUAAUUUAAGAGCUAGAAAGGGCCAAAUAACAGU | |
| | UUUCAUCAGGGAAAUAAAACAAUGUCCAUUCUCUGGAUUGGAUACAACCC | |
| | AAGAAAAGCCAUUACCCAGCAGUGACAUAUGAAAUAUCUGCUUUGAUUUC | |
| | AUGUGGGAGAUUAUUUAGCAAUGUCAAGACAAAACAUGCCAAUUCCUGGC | |
| | AGUUGUCAAAAUGCCAUUCCUAGUGUAACCCUGACAAAAAAAAAUCCACU | |
| | CCCUCUGCAAAUGUCACCAAGCUUCUGAUGGAAAAUGGAUAUAUUUGCCA | |
| | GUUUGGGAGAAUAAAGAAAAGACUGGAAGGAAGAAAAAGUUUCCCUUUAG | |
| | GAGGAAACUAGAAGGAAAAGGAGGGAGGAAGGAAGAAAGGGAAGGAGAAA | |
| | AAAAAGGGAGAGAAGCAGGGAAGGAGGAAGGGUGACCUUUUAGUCUACCC | |
| | UUCAGAUUUAUGCUAAAAGUUUGCCAGGUCAGAAAACAGGCUUUGGAAUU | |
| | AAGGGAGAUAUGAGACCAACGUCAGGCCCUGCCACUUAAGAGUUACCUAC | |
| | ACUUGGUAACUUCACCUUCAUUUGUCUCAGUGUCUUCACUGGAAAAAUGA | |
| | AAAAUAAUAGUACAAUUAAUAAUGGUUAAAAGAAGCAACCUGGCCAGGCA | |
| | CGGUGGCUCACGCCUGUAAUCCCAGCACUUUGGAAGUCUGAGGCGGGUGG | |
| | AUCACCUGAGGUCAGGAGUUCAAGACAGCCUGGCCAACGUGGCGAAACCC | |
| | UGUCUCUAUUAAAAAUACAAAAAUUAGCUGGGCAUGGUGGCGUGCACCUG | |
| | UAAUGCCAGCUGUUAGGGAGGUGGAGGCAGGAGAAUCACUUGAACCCAGG | |
| | AGGCAGAGAUUGCAGUGAGCCAACAUUGCUCCAUUGCACUCCAGCCUGGA | |
| | CGACAAGAGCAAAACUCCAUUUCAAAAACAAAAAUGAAGUAACCCAUGUG | |
| | CAGUGCUGAGCCUGGUGCCAAUCUGUAGAGAGCACAAUACAUAAGAUCUG | |
| | GUAUUAUAGGCCUACGGAAACAAUGUAUCCUGGUGCUCCAUGGAAAACAU | |
| | UUUCUUUAUUUAAAUUCAUCGACUUAAAAACACCUAGACAGAAAUUAUGA | |
| | AUAGGCUAUGCCUCUUUAUUUCAUAGGCAGAAUGGCAAGUUUUGAAUAAA | |
| | AGUAUGCUCUUGUUUGACACAUGGAAAAUAGGAAAAGGCAUCUGAAGAAU | |
| | CUUCACAUUAUCAAGCCUGAACCUUCGCAGAACACUAGAGGUCCCUCUUG | |
| | GCACUGAAUCCUCCAGCCCCGAUGAUGCAGAAUUCAGAGUGACAAUUUUC | |
| | UGCCUCAGCCCCACUAGAUGUCUCUUCAAUAAAGUUCUAAUACAGUUAGU | |
| | GCCCUGGCAUUGAUUCGAUGCCUGGGAACCAUUACAUAGAAAGAACAUAG | |
| | UUUUAAAUAAUCAAACCAUUUUCCUAAAUGUGCAUACAUUCUAGAAGCCA | |
| | CCCUCCACUGCCACACACAUAAUUCAAACUGAAGAUGUCUUUUGUUUUCC | |
| | AGAACCAUUGCCUGAUAUUAAGAUGAUAUCAGGGAAAGGGAGCAAAGGUG | |
| | ACAAGGAAGUUGUUUCGAUUAAUUGGGAACCAUAGAUCGUACUUGGAAGC | |
| | CAUGGGGGAGAUGCCCUCCACGAAAUUAAAAAUGAAGUUACUCUCUCAGA | |
| | GUUAAAUCACCAAAUCAAUGGGAGUGCUAGCAAUGUGGCUUUAAUGGCCC | |
| | AGGUUCCAGUAAGCAGAAAAGUCAGACUUCUGUCUUCUACAUAGCCAACU | |
| | UCCUCAAAACACGAAAGAAGAGAAUGCCUUUCUGAAGGAAGGCAAUUUCU | |
| | UCUAGUUGCAUCUAAUCAAAACUUUAUUGUGUUUCUAUUGCCUGCUGUUU | |
| | UCCUAAGAAACGUUGAAUUACUGGGAUGAUACCUGAUUCUCACCAGCUAC | |
| | CAGAACCACCUCCUUAGUUUUCAGGGAGUGUUUUUUGACACAAACCACUU | |
| | CAACAGCAUUGCAGCAGCUAGUUUAAAAGGCAAUAUUUUGUCUUGUGUUU | |
| | AAUAAGCUUAAAAACUCACAAGCCCACCUAGCAUUUCUAACCAGCAUUUA | |
| | UCCAUUUGUCUGAAUGGAUCGAAGAUUGCCUCAUGGGCAUAAUAACUGAC | |
| | UUUAGGCAUAAUGGUUGUGAUGCCUGGCACAGUGGGGUAUUCUGUUAGGG | |
| | GAGCGAGAGAGCUGUGGACAGGGAAAUCACGUAGCUUGGGAAGCCUCAAA | |
| | CUACAAAGAUAUAGUAGCAGGUAUGGGCAAGGCACAGAGAAGCUGAAAGU | |
| | GGGGUGCAUGCGAGACCACAACAUAGGCUGGUAUUGUGUUUAAGAAAUUU | |
| | CAAUGUAAAUGUCUUUAGGCAGGGGAUUCACCCGAGUUAGCCACCAUUUC | |
| | CACCAUAUUCCAUUGCUUCCUAUUGUCUUAGGCCUGGGGUAAUUUGAUAA | |
| | CCUCGAACAUCUGGCCCCUUUGGCCUGAGUCAGAGCUGUUUUUUCAGGGA | |
| | GGGUUUGCUAGAAAGUAAAUGAUUGGGACAAUUAGAGAGAUUAGAAUAAG | |
| | AUCUAUAGAUUUAGAUAACACUAUCAUAACAAGUCUAAUUUACUAAUUUU | |
| | GAUCAUUGUACUGUGAUUAUGUAAGAAAAUAGUUAUUUUUAGGAAAUUAA | |
| | CUCAAGUAUAUGAGAGCAAAGGCAUAAAGAUAAAAAUAACUACAGAUGAC | |
| | AAUGUCUCAUUCCAGAUCUGCCAUAUAAGGAUUUCUAGAAGUGAGGCCCU | |
| | GAAACCUGCAUUUACCAUGAUCCCCAGGGAAUUCCCGUGCACCUUCAAGA | |
| | CUGAGAGGCCCGGAUCUGUAACACCUGCUGAAGAAUGACACCCAUUUACG | |
| | AGAUAAAGAAAACACUGUUCUUUGCUGCUCCCCUGGUUACCCUCAAAAGC | |
| | CAGAAAGAAGGGAGGAUGAAGAGAAAGUCAGCCUCUGCAGACAUAGCUGU | |
| | CAUUUGUAACUGCUGCUGUUUCCCAGUCAGCUUAAAUGGAAAAUGGACUG | |
| | CUCUUACACCAACGUCACUUAAGUCCAUCACGGCAGUACUCCAGGUCCUC | |
| | CUUUCCCAUGUAUUGCCUGAGUGGGGCACAUUGCCCCCUGACAGACACAG | |
| | GAUGCUGCCCCCAGGCCAACACUUAGAGCUAGAACAGCGACGCUCAUCAC | |
| | AGAGCUAGAAUUGCAAGCUCAGUCAGGUACAGGGAGUGUUGUGCCUGAUU | |
| | GCAAAAAACUGACUCAGCCUUUCAGUAAAAGUGCCUUAGGGAAUGGAACU | |
| | AGAUUGUCCUGUGACAAACCAAUGAACACAUCUGCUUGUCUCAAAAUAUG | |
| | UGAAGCAGAACCAAGCUUCCAGUGCUGAACACAGGACUGCUCUAGUCACC | |
| | AGGCAGCAUCCUUUCCCAAAGAAGGUUUCAUAGAACACUAGCCUAGUAGA | |
| | UGAUCUUGGCAAAAAGGAACCCAUAACUAAGUAAGUUCUGGAAACGCUGU | |
| | AUUUUGUUUCUCCCCUCUUGGAAACUGAAGAUGCACAUUAACAUAUUAAG | |
| | UGCUCUGAAAAGUCACGCACUGAAGAAAAAACCAGUAUGACUCUUGUUUA | |
| | GCUCAGUAUUUCCUGAAUAUGUUCUUUGAUGAGACUCCUUUUUCAUUGAG | |
| | UGCCUAUUAAUAUUUUCUAGAAUAAGGUUUUAAAGAAAAAAACUGAGGAA | |
| | ACGUUAUAGAGGAGAAUUUAUAUUCAAAGGGGAAGUCAUUUAGUUCCAUA | |
| | AAUGGAACGUUAAUUGGAGAAAGAUUGGCAGUUGUGAAGCACAUCUAAAA | |
| | GUAUUGGCAGAGCCUCUGAAGGACUUGGGAAAUGGACUUCCAUUCCCUGC | |
| | CAGGAAACUUCCUUAGGAAUAAAGGGACUCCUUUGGUCCUGAUCAGAAAG | |
| | GGAGCAGUAUUCCUUGUCUGCAUUAGAGUGGAAUAUUGGGAUGAUUAGCU | |
| | ACCAGAAGAGUCCUCUUUGAUCUUUCCCACUCCUUCAACCCCGUAUCCAU | |
| | UCCACCGGAAAUCCUACCCUACGUCCUCAAUCUCAAUCUCCCACUUCCAG | |
| | UGCUGCAACCUCAGCUCACUGCAGCCUUGACUUUCUGGGCUCAAGCGAUC | |
| | CUCCCACCCCAGCCUCCCAACCAUCUGGGACCACAGGGAGGUGCAAUCAC | |
| | GCCUGGCUAAUUUUUGUAUUUGUAGUAGACACAGGGUUUCUCCAUGUUGC | |
| | CCAGGCUGGUCUCUAACUCCUGGGCUCAAGCAACCCACCUGCCUUCGCCU | |
| | CCCAAAGUGCUGGGAUUAUAGGCAUGAGCCACUGUACCCAGCCUCAAUCU | |
| | CCCACUUCUUACACAUCCACUGCUGCAAUAGUCUACUCACUGGUUUCCCU | |
| | ACUUUCACUUUUAUUCUCCUGCUAUGGUCUGAAUAUUUGUGUCCCACAAA | |
| | AAUUCAUAUGUUGAAAUUCUAACCCUUAAGGUGAUAGUAUUAGGAUAGUA | |
| | UUGGGGCCUUUGGGAGGUGAUGAGGUAGUGAGAGUGGCACCCUCAUGAUU | |
| | GGGAUUAGUGCCCUUAUAAAAGAGGCCCCAAAGAGAGCCCUGAGGUUGCA | |
| | GCGAGAAGGCCACAUCUAUGAACCAUAAAGCCAGCCCUCACCAGACACCG | |
| | AAUUUGCCAGUGCCUUGAUCUUGGACUUCACAGCCUCCAGAACUGUAAGA | |
| | AAUAAAUGUUGUCUAUAAGCCAGCCAGUCUGUGGUAUUUUGUUAUAACUG | |
| | CCUAAACAGACUGACACAACAUCUAGUGUAUUGUCCAUACUGCAGCAAGG | |
| | UGAUCUUAGCACUUAGAAUCUGAUAAAAAUCACACUGCUUAAAAACUUCC | |
| | AAAACCUGUCCCUUGCCAUGGAGAAAACACAAAGAUAACAUAGGCCUGGC | |
| | CUGGCAUUUCCCUUCAAACUCAUCUUCACUAAUCUUCCACUCAUCUGCAU | |
| | GUUCCAGCCACACUCCUCUUCUCCUGGAUUCUCUUUACCUGGAAUUCUCC | |
| | UUCCCAUCUCGAUUUUGCCUAUUUGCCCUUCAAUAUAGAUCACGGUGAUC | |
| | UAUGAUGGUCAUAGUGAUCACAGAUUCAUCACAGAACACUAUGCAAAAAU | |
| | CAUUUCCUCCAGGAAGACUUUCUUGAUUCAACAGUCUAGGUUGGAGCAGC | |
| | UCAAGUGCAAUCCAUACUUCGGUGCCAAUCUACAAAUUGUUUCCAAUGUG | |
| | AUAAAUAUUAAAAUUAAGAAAUAAGCAUUUAGAAAGUUCUACAGUGUUUU | |
| | AAAAUUACCAUGACAUCCAAGCACAUGGUCAGUAGACUCCCCUUGUUGAA | |
| | CAGGGCAAAGAGCAAUUCAGGUGUUGUCAAAAUCACGUGGUCAGUCACAU | |
| | GUAGCACAAUUUGUAUGCUAGUAUCAGUCCAGGGCAGAUUGAAGGGAAAA | |
| | GUGGUCUUUCAGCACACAUAGUUAGAGAUGCACUGGUCUAGGUCACUUUG | |
| | UCAUGUUAUAUAGUCACAGCACCAUGUACCUUCUUUCCAAAGCAUCUAUC | |
| | ACAGUUGGUAAUUUUAUGUAUUUUUUGCGAACUUUUUUCUUAUUGUCUUU | |
| | CUCCUACACAAGACUCCUAGCUUCCUGACAGCAAGAACCAACCAGGCUUG | |
| | UUGCUGCUCAAUGUCAAAUCUUUCUAGUCCAGCUGAAUACCUGGGACACA | |
| | GUUGGUGCUUAAACAAUGUGACUAAUAAAUAAGUGGAAAACGUAUACCUA | |
| | GUGAGCCUUGUCAUCAAUUUUAAUACUGUAUCACCUCAACACCAUUCUUA | |
| | GCACUUACUGAGUUACCUGUGGCUUAUAUGUGAGGAUAAGGGUGAGCAAU | |
| | GAGAGAGAGAUGAGAGAAUAAUUAUUUCAUUUUAUGAACUCAACCAGACC | |
| | CUUUCAGAUCACAUUUCAAUGGCAUAAUAGGUAUAAAAUGAGUAGUGAAC | |
| | AAUGAUGUUUUAAGGGUACAAAGGAAUGCUUUGUCUUUGGUAACCCAUAU | |
| | CUGUGACCUAUUGUCACACAUCUUGGGUAUUUCGUUUUGUUUGAUGUUUA | |
| | UAUUUGACUCUAAUUAAGCAACAUCAUAAAAUUUCAUUGCCCUCCCAGCA | |
| | ACAGAGCUCAUGCCAGCUUUCGGUGAUGUUGUGUUUCCUCACCCAGCUCU | |
| | AUCCUCCCUGCCUUUGUUCACAGCUGUUUUGCUGAUAAAAUGGAGAGAAA | |
| | GAGAGCUGGUAUUCAGCUGACAGCUUGCUUCUGGCAGCUGCUGGACCUCA | |
| | GAGCAUAAUUUCCUCCCUAGUGGGUUAUCAGAAUCAAACACCCUCGACUA | |
| | AUCAGAAUUUCAAAGAAAGCAGAUAUCCAGUUGAAUUUAAGAAGAUUAUU | |
| | CCAAAAGAGCUCUGAGUAGGACAUUGGACUUUUGGCACCCUAACUAUUUG | |
| | CUCAAACAGGCAUCAGAGUCAGCUGGAGUCUUGAACUUUUUCCAGGAAAG | |
| | AGAAGAAAUUUUAAUAUAGUGAAAAGAGCAAUGGAUGGUGGUAGCAAGUC | |
| | UUAGCCCUGCUCUGGGAAAGGUACCUAAUCUCCGUGGUUUGAUUUCCUCA | |
| | UACGUUGAAAAGGGGGAUUGGACCAGAUGACCUCUUGAUCUCUUCUAGCU | |
| | CUGAAAUUAUGGAAAUGAAUGAUUCAGUUCCUAGACAGAGGUUUCAAGAA | |
| | UGCUAAGGAGCUGAGUAUCUGUUCCCAGAUGGCAAAGUUGGCAAAGUUUA | |
| | UAUAGGACUUAAAGGUCUUUCUAUUUACUACUCAUUCAGUUUAAUCCUUC | |
| | UUCUGAAAGACAGUACAGUAUUUACCUCUUGCCUAAUAUUGUGAACAUGA | |
| | AUUUGUUUAUACAAUCUCAUGACUCUGAGAUCUAACUCUAAUUCCAUAAA | |
| | UAGAACUAUAAAUACUAAUGGUAUUCCCAAAAACAUCAUGCUUGGUGAAA | |
| | AUGUUCUAGGAUCAAAUACGUUUCUUUCUUUCUUUCUUUUUUUUUUUUUU | |
| | UUUUUUUUUGAGAUGGAGUUUCGCUCUUGUUGCCGAGGCUGGAGUGUAAU | |
| | UGUGUGAACUCAGCUCACUGCAACCUCUGCCUCCCGGGUUCAAGCAAUUC | |
| | UCCUGCCUCAGCCCACUGAGUAGCUGGGAUUACAGGCAUGUGCUGCCACA | |
| | CCCGGCUAAUUUUGUAUUUUUAGUAGAGACGGGGUUUCUCCAUGUUAGUC | |
| | AGGCUGGUCUUGAACUCCCAACCUCAGGUAAUCCGCCCACCUCGGCCUCC | |
| | CAAAGCACUGGGAUUACAGGAGUGAGCCACUGCGCCCAGCUGGAUCAAAU | |
| | ACGUUUCUGAAAUGCUGUACUCAAUAUCCUCUCCUUAAUGUUUCACAUGG | |
| | CAGAAGGGUGCAUUAAAGCCUAGAAAGUCAUGCGCUAAAGAAAGCCCACU | |
| | UAAGUUUGCUUGCCCUAGAAUUUCUCAGCGUUGAAGUCUUUUUUUUCCUC | |
| | UGGAACACUUGUUUUCAUUUUUAUUUUUUAAUUUUUAUUUAUUUAUUUAU | |
| | UUAUUUAUUUAUUAUUAUACUUUAAGUUCUAGGGUACAUGUGCACAACAU | |
| | GCAGGUUUGUUACAUAGCUAUACAUGUGCCAUGUUGGUUUGCUGCACCCA | |
| | UCAACUCAUCAUUUACAUUAGGUAUUUCUCCUUAUGCUAUCCCUCUCCCA | |
| | GCCCCCCACCCCUCAACAGGCCCUGAUGUGUGAUGUUCCCCUUCCUGUGU | |
| | CCAAGUGUUCUCAUUGUUCAAUUCCCACCUAUGAGUGAGAACAUGCGGUG | |
| | UUUGGUUUUUUGUCCUUGCGAUAGUUUGCUGAGAAUGAUGGUUUCCAGCU | |
| | UCAUCCAUGUCCCUGCAAAGGACACAAACUCAUCCUUUUUUAUGGCUGCA | |
| | UAGUAUUCCAUGGUAUAUAUGUGCCACAUUUUCUUAAUCCAGUCUAUCAU | |
| | UGAUGGACAUUUAGGUUGGUUCCAAGUCUUUGCUAUUGUGAAUAGUGCCG | |
| | CAAUAAACAUACGUGUGCAUGUGUCUUUAUAGUAGAAUGAUUUAUAAUCC | |
| | UUCGGGUAUAUACCCAGUAAUGGGAUUGCUGAGUCAAAUGGUAUUUUCUA | |
| | GUUCUAGAUCCUUGAGGAGUCGCCACACUGUCUUCCACAAUGGUUGAACU | |
| | AAUUUAUGCUCCCACCAACAGUAUAAAAGUGUUCCUAUUCUUCCACAUCC | |
| | UCUCCUGCAUCUGUUGUUUCCUGACUUUUUAAUGAUCGCCAUUCUAACUG | |
| | GUUUGAGAUGGUAUCUCAUUGUGGUUUUGAUUUGCAUUUCUCUGAUGGUC | |
| | AGUGAUGAUGAGCAUUUUUUCAUGUGUCUGUUGGCUGCAUAAAUGUCUUC | |
| | UUUUGAGAAGUGUCUGUUCAUAUCCUUCGCCCACUUGUUGAUGGGGUUGU | |
| | UUCUUUUCUUGAAAAUUUGUAGAAGUUCUUUGUAGAUUCUGGAUAUUAGC | |
| | CCUUUGUCAGAUGGGUAGAUAGCAAAAAUGUUCUCCCAUUCUGUAGGUUG | |
| | CCUGUUCACUCUGAUGGUAACUUCUUUUGCUGUGCAGAAGCUCUUUAGUU | |
| | UAAUUAGAUCCCAUUUGUCAAUUUUGGCUUUUGUUGCCAUUGCUUUUGGU | |
| | GUUUUAGUCAUGAAGCCCUUGCCCAUGCCUAUGUCCUGAAUGGUAUUGCC | |
| | UAGGUUUUCUUCUAGGUUUUAGGUUUAACAUUUAAGUCUUUAAUCCAUCU | |
| | UGAAUUAAUUUUUGUAUAAGAUGUAAGGAAGGGAUCCAGUUUCAGCUUUC | |
| | UACUUAUGACUAGCCAGUUUUCCCAGCACCAUUUAUUAAAUAGGGAAUCC | |
| | UUUCCCCAUUUCUUGUUUUUGUCAGGUUUGUCAAAGAUCAGAUGGUUGUA | |
| | GUUGUGUGGCGUUAUUUCUGAGGCCUCUGUUCUGUUCCAUUGGUCUAUAU | |
| | AUCUGUUUUGGUACCACUGCCAUGCUCUCUUGGUUACUGCAGACUUGUAA | |
| | UAUAGUUUGAAGUCAGGUAGCGUGAUGCCUCCAGCUUUGUUCUUUUUGCU | |
| | UAGGAUUGUCUUGGUAAUGCGGGCUCUUUUUUGGUUCCAUAUGAACUUUA | |
| | GUUUUUCCAAUUCUGUAGAGAAAGUCAUUGGUAGCUUGAUGGGGAUGACA | |
| | UUGAAUCUAUAAAUUACCUUGGGCAGUAUGGCCAUUUUCACGAUAUUGAU | |
| | UCUUCCUAUCCUUGAGCAUGGAAUGUUCUUCCAUUUGUUUGCAUCCUCUU | |
| | UUAUUUCAUUGAGCAGUGGUUUGUAGUUCUCCUUGAAGAGGUUCUUCACA | |
| | UCCCUUGUAAGUGGGAUUCCUAGGUAUUUUAUUCUCUUUGAAGCAAUUGU | |
| | GAAUGGGAGUUCACUCAUGAUUUGGCUCUCUGUUUGUCUGUUAUUGGUGU | |
| | AUAGGAAUGCUUGUGAUUUUUGCACAUUGAUUUUGUAACCUGAGACUUUG | |
| | CUGAAGUUGCUUAUCAGGUUAAGGAGAUUUGGGGCUGAGACAAUGGGGUU | |
| | UUCUAAAUAUACAAUCACGUCAUCUGCAAACACGGACAAUUUGACUUCCU | |
| | CUUUUCCUAAUUGAAUACUCUUUAUUUCUUUCUCUUGCCUGAUUGCCCUG | |
| | GCCAGAACUUCCAACACUAUGUUGAAUAGGAGUGGUGAGAGAGGGUGUUC | |
| | UUGUCUGGUGCCGGUUUUCAAAGGGAAUGCUUCCAGUUUUUGCCCAUUCA | |
| | GUAUGAUAUUGGCUGUGGGUUUGUCAUAACUUGCUCUUAUUAUUUUGAGA | |
| | UAUGUUCCAUCAAUACCUAGUUUAUUGAGAGUUUUUAGCAUGAAGGGCUG | |
| | UUGAAUUUUGUCAAAGGCCUUUUCUGCAUCUAUUGAGAUAAUCAUGUGGU | |
| | UUUUGUCUUUCGUUCUGUUUAUAUGCUGGAUUACAUUUAUUGAUUUGUGU | |
| | AUGUUGAACCAGCCUUGCAUCCCAGGGACGAAGCCCACUUGAUCAUGAUG | |
| | GAUAAGCUUUUUGAUGUGCUGCUGGAUUUGGUUUGCCAGUAUUCUAUUGA | |
| | GGAUUUUCACAUUGAUGUUCAUCAGGGAUAUUGAUCUAAAAUUCUCUUUU | |
| | UUGUUGUGUGUCUGCCAGGCUUUGGUAUCAAGAUGUUGCUGGCCUCAUAC | |
| | AAUUAGUUAGGGAGGAUUCUCUCUUUUUCUACUCAUUGGAAUAGUUUCAG | |
| | AAGGAAUGGCACCAGAUCCUGUUUGUACCUCAGGUAGAAUUCGGCUGUGA | |
| | AUCCUUCUGGUCCUGGACUUUUUUUGGUUCGUAGGAUAUUAAUUAUUGCC | |
| | UCAAUUUCAGAACCUGUUAUUAGUAUAUUCAGAGAUUCAACUUCUUCCUG | |
| | GUUUAGUCUUAGGAGGGUGUAUGUAUCCAGGAAUUUAUCCAUUUUUUUCU | |
| | AGAUUUUCUGGUUUAUUUGCACAGAGGUGUUUAUAGUAUUCUCUGAUGGU | |
| | AGUUUGUAUUUCUGUGGGAUCAGUGGUGAUAUCCCCUUUAUCAUUUUUUA | |
| | UUGAGUCUAUUUGAUUCUUCUCUCUUUCUUCUUUAUUAGUCUUGCUAGUG | |
| | GUCUAUCAAUUGUGUUGAUCUUUCAGAAAAAAGAGCUCCUGGAUUCACUG | |
| | AAUUUUUGGAGGUUUUUUGGUGUCUCUAUCUCCUUCAGUUCUGCUCUGAU | |
| | CUUAGUUAUUUCUUGUCUUCUGCUAGCUUUUGAAUGUGUUUGCUCUUGCU | |
| | UCUCUAGUUCUUUUAAUUGUGAUAUUAGGGUGUCAAUUUUAGAUCUUUCC | |
| | UGCUUUCUCUUGCGGGCAUUUAGUGCUAUAAAUUUCCCUCUACACACUGC | |
| | UUUAAAUGUGUCCCAGAGAUUCUGGUACGUUGUGUCUUUGUUCUCAUUGG | |
| | UUUCAAAGAAUAUCUUCAUUUCUGCCUUCAUUUCGUUAUUUACCCAGUAG | |
| | UCAUUCAGGAGUAGGUUGUUCAGUUUCCAUGUAGUUGUGUGGUUUUGAGU | |
| | UAGUUUCUUAAUCCUGAGUUCUAGUUUGAGAUGGCACUGUGGUCUGAGAG | |
| | ACAGUUUGUUGUGACUUCUGUUCUUUUACCUUUGCCGAGGACUGCUUUAC | |
| | UUCCAAUUAUGUGGUCAAUUUUAGAAUAAGUGCAAUGUGCUGAGAAGAAU | |
| | GUAUAUUCUGUUGAUUUGGGGUGGAGAGAUCUGUAGAUGUCUAUUAAGUC | |
| | UGCUUGGUUCAGAGCUGAGUUCAAGUCCUGGAUAUCCUUGUUAAACUUCU | |
| | GUCUCAUUGAUCUAAUAUUGACUGUUGGGUGUUAAAGUCUCCCAUUAUUA | |
| | UUUGUGGGAGUCUAAGUCUCUUUGUAGGUCUCUAAGGACUUGCUUUAUGA | |
| | AUCUAGGUGCUCCUGUAUUGGGUGCAUAUAUAUUUAGGAUAGUUAGUUCU | |
| | UGUUGAAUUGACCCCUUUACCAUUAUGUAAUGACCUUCAUUGUCUCUUUU | |
| | GAUCUUUGUUGGUUUAAAGUCUGUUUUAUCAGAGACUAGGAUUGCAACCC | |
| | CUGCUUCUUUUUUUUUUUUCUUUCCAUUUGCUUGGUAGAUCUUCCUCCAU | |
| | CCCUUUAUUUUCAGCCUAUGUGUGUCUCUGCAUGUGAGAUGGGUCUCCUG | |
| | AAAACAGCAAACUGAUGGUUCUUGACUCUUUAUCCAAUUUGCCAGUCUGU | |
| | GUCUUUUAAUUGGGGCAUUUAGCCCAUUUAUAUUUAAGGUUAAUAUGGUU | |
| | AUGUGUGAAUUCAAUCCUGACAUUAUGAUGUUAGUUGGUUAUUUUGCUCG | |
| | UUAUUUGAAGCAGUUUCUUCAUAGCAUUGGUGGUCUUUACAAUUUGGCAU | |
| | GUUUUUGCAGUGGCUGGUACCGGUCGUUCAUUUCCAUAUUUAGUGCUUCC | |
| | UCCAGGAGCUCUUGUAAGGCAGGGCAGGUGGUGACAAAGUCUCUCCACAU | |
| | UUGCUUGUCUGUAAAGGAUUUUAUUUUUCCUUUGCUUAUGAAGCUUAGUU | |
| | UGGCUGGAUAUGAAAUUCUGGGUUGAAAAUUCUUUUCUUUAAGAAUGUUG | |
| | AAUAUUGGCCCCCACUCUCUUCUGGCUGGUAGGGCUUCUGCUGAGAGAAC | |
| | CGCUGUUAGUCUGAUGGGCUUCCCUUUGUGGGUAACCUGACAUUUCUCUC | |
| | UGGCUGCUGGAACAUUUAUUAACACUUACUAAGCUAGGAUUCCACUGAAC | |
| | AAACUUGGAAAAUGGUGCUGUAAGAGGGAUCUGUGCACCCACGAGCAUCC | |
| | UCCACUUGGUAGAGGCCAGGAAGUUCUUUCAAAAGGCCAAUACUCCAGUC | |
| | CACCCCAGACUUCCUGAAUCAGAAUCUUGGGAGGUGGAGUCCAGAAAUAU | |
| | UAGCUUUAACAAGCCUUCCAGACAAUGGUAUGCUGGAGCUGGGAGGUAUC | |
| | AACUCUCCAGAACAGAUUGUUAUUAAAAUUCCAGCAAUUUUAGAACUUCG | |
| | UGAGCUAUUUGACUUCACAUUGGUAGACUGAAAUUUGCUGUGGUAGAAGU | |
| | AUUUACACCAUGAAAAUUGGCAGAUGCUACAAUUCAGGGCUUUUCUGUUC | |
| | UCCCCCAGACAGCUAGUUAUUAGACAUUUAUCCAUAAACCACUGCCUCCA | |
| | GGUCAUCCUUACAUACAUUAAAAUUUGAGACCCACUGAUAAUGCAAGUAU | |
| | GUGCUAUUUCCAGAAGGAAUUAUGUCAAAACUGUUAAAAUUUAAUCCCUA | |
| | GUUUUACCAUGUUUUUAGAUAUUCCUAAAAAAGAUGUGCAGAAAAAAAAU | |
| | CUUACAUUUUCUUUUCAAAAUUAAGUAGAAAUUAUCUAGGAAUAUCUAGA | |
| | AAUAAUCAAGUAAGCAGAACCUCAUUAUGAAGAAGCAAUUUUUUUGUCUU | |
| | UACAGACUUUGGUUGUUGUUUGGGUUUGUUUUUUACAAUGUAUUUUUUAU | |
| | UUUUUAUUUUAGGUGCAGGCAUUUAAUCAUAAAAUUAAUAUUUUGUGCUU | |
| | UGGCAGUUAAAAAUUAUAUAUUUAAGGUGUGUGUAACUUGAUGAUUUGAU | |
| | AUACAUAUACAUUGUGAAAUAAUCACCACAAUCAAGCUAAUUAACGUAUC | |
| | UAUCACCUCACAUAGUUGCCAUGUUUUGUGUGUUGUGUGAUCAGAACAUU | |
| | UUAGACCUCUGUCUCAGCAAAUUUCAAGUGCACAAUAGUAUUCUUCACUA | |
| | AAUUUACAGUGCUAUAUAUUAGAUCUUCAGAACUUAUAUUUUGUAUAACU | |
| | GACUUGAUACCCCUUGAUCAAAAUCUCCCCAUUCUACCCCACCCCACCCC | |
| | AGCCCCUGGCAACCACCAUUCCACUCCCUGAUCCUACAAGUUUGAGUGUU | |
| | UUAGAUAGGUGAGAUCUCAAGUAUUUUUUCUUCUGAGUCUGGCUUAUUUC | |
| | AUUUAGCUUAAUGUCCUCCAGCUUCAUCCAUGUUGUCUCAAUGGCAGGAU | |
| | UUCCCACUUUUUUAAGGUCAAAUAAUAUUUAUUUAUAUAUAUCACAUUUU | |
| | CUUUAUUUUACAGGCUUUCUAAAUUGAGAUAUGUACAGGUCUUGCUGACA | |
| | GAUAUAGCUUUCUUGCUCACAGAUAUAGCUUUACUGUGGUCUAUUCUUUC | |
| | AUAAUCUGGAAAAAAAAUCUAGAAGUAUAAAAAUAUUCUCGCCAGGCGUG | |
| | GUGGCUCACACCUGUAAUCCCAGCACUUUGGGAGGCUGAGGUGGGCAGAU | |
| | CACGAGGUUAGGAGAUCGAGACCAUCCUGGUUAACACAGUGAAACGCUGU | |
| | CUCUACUAAAAAAAAUACAAAAAUUAGCCAGGCGUGGUGGCAGGCACCUG | |
| | UAGUCCCAGCUACUCGGGAGGCUGAGGCAGGAGAAUGACGUGAACCCAGA | |
| | AGGCGGAGCUUGUAGUGAGCUGAGAUUGUGCCACUGCACUCCAGCCUGGG | |
| | CGACAGACCAAGACUCCUUCUCAGCAAAAAAUAAAAUAAAAAUAAAAAAA | |
| | UAAAAAUUUUCUCAGAUUGUUGUCACUUUUUAAAAAAACUUAUAUACUCC | |
| | UCUUCGCCACCACCUUUCAUUGAAAAGAAACACAUCUCACACCUGUUCAG | |
| | AUUUUAGCUGGGCUCUUUUGUCCCACUGGUGCUUUAGGGGUAUUGAUAUA | |
| | GUACAUUAUUUCUUUCUUAAAGGGGAUGCCUUGGACUGAUCCAAUUAGAG | |
| | UCCUGAUCUCACAUUUGAUAGCAAACACAGAGCCCAGAAUGAUCUUUUCU | |
| | UUAUUUCUCUGGUUCAAGAAAAGUACAGAAUCCAAUGACAGAAGCAGAAA | |
| | AUAGAUUGUGAGAUGGAAGAGUCUGAGUUUCCACUUAACAUUUGUCCUUC | |
| | UGUUCCCUCUGAAGGUGGACAACAUGAAAGUGACUGCUGGACUAAAAAUG | |
| | GUUUUGCUUGAACAGCUUAACUGACAUAAACAUACGCCACUGAGAGUCAU | |
| | AUCCCAGGUCACUAGAACCUUGACCCACCACCAAGAUGUAUUUAAUUUUU | |
| | GUGAAUCCAGCAGUUAAUUCUGACAGCCAAAUGCUACCAGGUUGUUUAUC | |
| | UCUCUUGUAAAAUGCCAUAUGUUAUAUGCUUAGAGGCAAGCAUCUCAUGU | |
| | CUCCAUUUUAAAAUUAACAAGUUAAUUUUUAUAGCCCAAAUCUUAAGAAU | |
| | UUGAGCAUCAGAUGCCUUUAAAAAUUUGGUAUAUUUUUAUGUCAUACUUU | |
| | UAAAUUAUUUCCAUCUAAUAGUGUUUGCUCCAUAAACAAAAUAUGUCACU | |
| | UAUAACUUUAUAUUUUUGUAAGUUUUUAUGUAAGUUAAAGAAAAUUAAAU | |
| | AUCUUGUAUUACAUACUAAAUUAGAAAAAAAAACCUAUUGUUAUAUAGUU | |
| | GAACAUUGAGUUAUUUAAAAUUAACAUCAAAAUACAGUAUCUGAAUGUUU | |
| | UUACAAAAAAUUCUUAUCAUUUACACAAAAUAAUAAUUUCUUUUAAUUUU | |
| | UAAGGAGAUUUGAAAAGAGUUUAGAAUUUGAAAACAUUUUGCUAAUUCAG | |
| | CCUUCAAGUAAAUUCAUGUAACAUGGAAUAUACACACUUAAAAGCUGGCU | |
| | ACACCUAAAUAAAAUUCCAAAGAAAUCUUUCCGAAAUGAUAGAGUCGCUG | |
| | ACCCAUAAUAGGGAAAUGUUUGGGGUCAUUGAAACCUUUAUCAAAUUGUU | |
| | UUAAUCUAACUUCAUGAUUACCUACUUGCCCAGCAAUGUAGAUUAUUGUG | |
| | UUUUGCAGGAUGUUAACAUUGAAGUUUGAACUGAGGUACCCACCCUUACA | |
| | AAUAUAGGAUGUCAAAAUGAAUACAACAUACUGCAUAUGUACAAGAUUUA | |
| | CAAAGAAUUAUCGAACUUAGCUUAUGAUGUUUAGAUGCUCAGCCAGAUUA | |
| | AGGAUAUACAAAGGUGAAGGGUUUAAAAGAAUUUUUAGAGAGUUAUUGCC | |
| | AUACUAUGAAUGUCUGUUUCCACCCCUAUCCUUAAGGCUCCACCUUGAGC | |
| | UUAACAGGCCUGUGGACAGGUCAUCUGUACUUCUACAGCGAGGGCAAGGG | |
| | AUACAUGAAUGGUUCCCUUGGACAGAGCGGGCCUUGAGAGAAAUCCAAUG | |
| | GAGGUCAACCUAGGACUUCCCAAAGGGCUAGAAGGAAUCUAUCAACAAGA | |
| | AGCUGGAAGGGAAAAUUGGAUGUCUACUCAUUCCAGAAAGAGUUGGAAAU | |
| | GACCAUACAAAUUCUCAAGGAGAGGUCAGCAAUAUUUCUCUGGAAAGGGU | |
| | CAGAUAGUAAAUAUUUCAGGCUUUGAGGGCUGUACCGCCUUUGUAGCAAC | |
| | UACUCAACUGUUUGGUUAUUGCACAAAAGCAGCCAUAAGCAAUGUGUAAA | |
| | CAAAUGGAUGUGUCUAUGUGCAGGUAAAACUAUUGACAAAAACAGGUGGC | |
| | AGGUUGGAUGGAGCCUACAGGCCAUACUUUAUCAACCCUGCUAUAGAUGC | |
| | AUCAGCUUGAGACAAAGGAGGAGGAGGUGAGCAGAGCAGAGCCCAGCUAU | |
| | GGAAAAGCCCAUGAAGGUCAAGUUCACUUCAACAUCCUGCCAGGUCUGCA | |
| | GCAUGUUCACACGACAGCCUUCCCCAUUCCUCAUUCCUCUUCCCUCCCUG | |
| | GCACACCUAUCCUGGAGACAUUAGAAGCUGGCCAGCGAGCUGGUUUGAGA | |
| | CAGGAGGAAAAGCCAGAGAAAGAGAAAUAAAGAAGCAGCAGCCACCAACC | |
| | CUGCACCCUUUCUCCCCAGCAAGCUUCCAGCCUGGGGAAGACAGCCAAGA | |
| | GAGGAGCGAAUAUUUGACAUUAACUCCAAUUCAGAGAUCCUGGACUGAAC | |
| | ACUCUUAAUUUCUGAAUGGAGACAAUUUCCAACUUAAAGUGACCAGAGAU | |
| | AGAACUGUUUAUUCCCUAAGAAUCAGUAGAAAAGUCACAGGACAGAGGAA | |
| | GGGAAAAGGAAAGCUAUAUUUUUAUUUUUAUUUACUUAUUUUUCACCCUG | |
| | UCUUAUGAUGCUGAGCUAUAUUUUUAUUAAAUCACACUUGCUUUUUCUAA | |
| | AUACUGGUUACAUACACAAGCCCAGAGUCAAACAUUUUCUUACCCUAUCU | |
| | GAAGACUCCAGCAGUAACAGAGAAACAAAUAACGAUGACAUCCACCUCAG | |
| | CCACGUCUGGCAAACUUGACACAAGCGGCUCACCAAGAAGGCAACCCAGC | |
| | AGUUAAUGUUACUGACCCAUUUGUCAUAUCCAGUUUCUCCAACUGUCCAU | |
| | AACAGGUAUUUAAUUAUAGAGGAUGAUUGGGGAUUCAUUUGUCCUUCAGG | |
| | AAAUUUCACGACUAAGGUAUGUCUUUCUUCCAGUAACAUGCACACACUCA | |
| | CACAGACUCAUUUAAUUCUCAAACCUAACAUGAUUAGGUUGGUCUAGGAA | |
| | AGGCCUCUCUGAGAAGGUGAAUUAAAGUUGAUCUGGACGAUGAGAGACAG | |
| | UCACGCAGAGAUCAACAAGGAGUACAUUCCAGAGAGGGGAAAAUGUUCAU | |
| | GCAAAGGACCUAUGGUAGGAACAAAUGUCAGGGAGCAGAAAGAAGCUUGG | |
| | UGUGUCUGAAGCCUGUGCAUGAUGUGAGGAUGAUAAGAGGUAUGUACAGA | |
| | GAGGCAGGUGAGGGUCAUGUGCUGAGGGCUUUUCAAGAAAGGACUUUGCU | |
| | GCAUUUGGAUUUUAUUCUAAGUUUGACAAAAAGACAGAUGAUGGGGGGCA | |
| | UUAAAUCAGGAGAAUAACAUAAACAUGACCUGACCUACAUUUUUAAUAUU | |
| | GUGUUCUGGCUUCUUUAGGAAGAAUGAAUUGUUAGGAGAUAAUAAUGGAA | |
| | AAUCAAUACAGAAACCAUUAGAGUCCUCUCGGCAAGAGAUGGUGGUGUAC | |
| | UUGCCUUAGGAUAGUAGUAAAGAUGAAGAAAAGUGGAAGAAUUCGGGGCA | |
| | GACUUUGAAAUAGAAUUGGCAGGACAUGCUGAGAGAUGGAUGUGGGAAUA | |
| | AGGGAAUAGAGGGAAUGAGAAUAAUGUCUAGAUUUGUGGCUUGAGCAACU | |
| | GGGUGGUGGUGUGAGGCCACUUACUGAAAUGGAGUCUGCUGAAUAGAAAC | |
| | AGAUGGGGAGGUUGGUAAAGAAUAAAGAUUGUCCUUAAUCGUGUUAGGUU | |
| | UGAGAUACCAUUUGGACACCCAAGUGGAGAUAUCAGGUAGGCAGAUAGAC | |
| | UUGGGCAAGUCAGUGCUGGAAAGCAAUAUUUGGGGUUAUCAACAUAAAAA | |
| | UGCUACUUGAUGCCAUAAGAAUAAAUGAGGUCAUCAAGGGAGAGAAGAAC | |
| | AGAAAGAAAAGUGAAGAAAAAAAUCCCAAGUCAUAAGCCCUGGGAUAUUC | |
| | CAUUGUUCAGAAUAAUAAGAAGAAAGAGGAUCCAUCAAACUAGUCUGCAA | |
| | AAAAGCAGCCUGAGAGGUGGAAAAUAAACCAAGCAAGUGUAGUGCCACAA | |
| | AAGCCAGAAGACCAAAGUGUUCUGUAAAGAAAGGAAUAGCCAACUGCACC | |
| | UAAUGCUGUAGAGAUGCCAGGAAAGGGGAGGAAGUGAUGUGACUGUAAUC | |
| | AGCAGCCUAGAGGUCAUCGGUGGGCAAUUCAAGAACAGUCUCAAUGGAGG | |
| | UGGGAUCACAAGUUCAGUAAAAUGGGGAUGAAGUCAUUAACUACAGAAAA | |
| | GCAACUUAAGACAUAUCACCAAGACAAGUAGCAGAGUAAUAAGGAAGUAG | |
| | CUAUUAAUAAAAAAAAAUUUAUCAGCCAAGUAUGAAAUGCAAGGCAUUGU | |
| | ACUAAGUGCAAUUGGAGAAUAGGAGAGAAACACUUUACAUUCCAUGCUCU | |
| | AUAGAGCUCAAAAAGUAUGGCAAGGCAUUGGAAGACUAAUCAUGGUGACA | |
| | UGUAUUUAUUAGCUAUUGCCAUACUAACACUAUAUAACAAAUAGUCCCCA | |
| | CAAUACAAUACACAAUAAGGAUUAAUCUCAAACACAAUAAGGAUUGAUUU | |
| | UUGCUUGUAAGUCAGCUGGAAGGUUCUGCUGAUUGGAGUCUGGCUCAGGG | |
| | AGUAGGAGCUGGGCUUGUUCAAGUGUCUGUACUCAGGGCCUUUCUCGGUG | |
| | CCAGAACCUUGGUGAGUGCAAAAGUUGCUUGUCCAUGAGUAUGGCUCUAC | |
| | CCACCAAAUUGGAAGAACACGAUCUGCCAAUGAAGAGAAUGAGGCUAGCA | |
| | UAUAAAGAGGGAUGAAGAUAAUUAUUAAGGAGUCUUAACUAUACCUUUGA | |
| | GCUUGAAUCCAAAUAUGCCUGAAGUCUUCCAUCCUGCGCUUCCCAGUAAC | |
| | GGAAACUAAAAACCUCCCAUUGUGUUUAAUAUAGUCUUAAUUGGACUCUG | |
| | CCACUUGCAAUCCAAAGAGUUCUGACCAAUACAUCCAAGUUAAUUUUGGA | |
| | CCUUUAAAAAAAUAAAUAUCCAUUGAUGAUUUAAUCAAAGAGAGAUUAUU | |
| | UUAAGGGGGAAUUUAGGAAGAUUCAUUUUCACAAACUGGUUAGGAGAGAU | |
| | AAUAAACUGCUGAGAUGAAGUCCAGCUGGCAAGAAUUUCAUAAUUUAGUU | |
| | CCUGAGGAUAAAAGGAAGGAAAAUCCCAUUUUCCUGUACCACAGCUGAUA | |
| | UUCAGUUGGUUCACAUAGGUAUAGCCAUGCUGGUUAUUUAAUGCCAGCAU | |
| | CCAUUCUGAUAAGUGGUAUCCACAUCUUCUGAUUAUUAGGUAUCUUGAUU | |
| | AUCACUGCUGUCCAUAUCUAUGCUGCAAUAUAUGUUCAACAAAGUGAAGC | |
| | UGCUUAGGAAUAUUUUAGAAUUCUGUUUUCUCUCUACCUAUGAUGUGUAA | |
| | CCUCAAUUUCUUUCACCUUGGAUAUCAAGAUGCAACAGAAUAAAUUUGUC | |
| | UGCAGCCUGGAUGAACUUGCUCCCCACGAGAGGGACUGACUUUACUCAUC | |
| | CUUCUCUUUUAACCCAGUCAUGCUGAAAUUAUCAGAGAGAGCCAGGCAGA | |
| | AUGAAAAUGGCAGUAACAUCCAGACUCUCCUAGACAUUGACCGGAAGUUG | |
| | ACCUCUGGCCACAGAUGCCAGAAGCAGGCAGGCAAGGAAGGGACCAAGGA | |
| | GAAGCCAUCAAGAAAAUGAAGGUACGAUAAACUGUGAAAAUUGCGUUGGC | |
| | AAUGCAUGAGUUACCACUGAGUCAACCUAUAUUUCCAACAAAAUCCUGGA | |
| | GAAUAAGCCUGCAGAAUACACAGACUAAAAAGAUGGCGGCUCCCCACCCC | |
| | AAAACACCUUCCCUACCCACCAGCCUCUGCUCAAAAUACCACCACACAAA | |
| | CUUGAUUUUUUAAUCUAAGGAAAGAAUCAAGCAGAUGAACUAUGAUUGAA | |
| | GCUUAUUUUGUAAUAGCAAUGAUUCAAAAACAAACUCUAUGUCCAAACUU | |
| | AGUCAGCUUUCCCUGACUGGCUAAAUAAAUUAUGAUGUGCCCAUACAAUG | |
| | GUGAGGCAGGAGAAUAGGGUCUGGAGGCAGAGAACCUAAGAUCGAUUCAC | |
| | AUUGACUUCUUAGGACUAAAUCAAAAGGAAAACCCCAACUUUCCACAACU | |
| | AAGAAACAAAAGUGUGGAAGCCUACUUCCUUUGCAAACCCUCCACCCACU | |
| | UUUUCUGCCUGGCAGAUGGAAAAUUGAACAUAUCUCUGAUUGGUUGCAGA | |
| | AAGCAUAGGAGUGUAACUUUUGUAACUUUACUUCAGCCUCUGAUGGGUUG | |
| | CUUUCCACAACCAUUCAGACACUUGCAUAGAAUGUAACCUUUGUAACUUC | |
| | ACGUCAGCCUCUGAUUGUGGGACCCACUUCAUUUACCUAGGGUGUACACA | |
| | AAGGAACCAGUGGGAAACCUCUAGAGGGUAUUUAAACCCCAGACAAUUCU | |
| | GGAACCAGGCUUUUGAGCCCCUAUGCUCGGCCAGCACCCACCCUGUGGAG | |
| | UAUACAUUCAUUUUCAAUAAAUCUUUGCUUUUGUUGCUUCAUUCUUUCCU | |
| | UGCUUUGUUUGUGUGUUUUGUCCAAUUCUUUGUUCAAGAUGCCAAGAACC | |
| | UGGACACCCUCCACCAGUAACAAUGGAAUACUGUAAUUCCAUUGAGCCCA | |
| | GACAGUGUCACGUGCCACCCCUACCUGCAUGGGAUCCUGGGGAGGCUAAU | |
| | AGGUUUAGUUGAGAAUAUUACCAUCUUGAACAAAGUCAGAGUUCUCAUCA | |
| | GAAAGAAGUAGAAAUGACAACUUGCUGCAUCUGCCACGCAACUUCAAUAU | |
| | CCUGCAAUAUGAGAUUGUUUGAGAAACGAAUGUACAACCACAUGAUGGAA | |
| | UUCUCUACAGAUGUCUAAUGCUAGAGAAAGAAUAAAGGGGAAAAUUGUGU | |
| | GGUAAAUGUUUUAGACAUUUUAAAUGAAAAAAGCAUUUUCAUUUAAAAAA | |
| | UGAAAAAGUUGAAAAAAUGUAAAUAAUAUGAUCACGUGUGUGUAUAUGUU | |
| | UGCGCGUGGAUGGGUGCGUGUGUAUCUCCUAGUACAUGCAUAGAAAAUCU | |
| | GUGGAAGAGGCUGGGCGCGGUAGCUGAUGCCUGUAACCCCAGCACUUUGG | |
| | GAGGCCGAGGCAGGCAGAUCACGAGGUCAGGAGAUCGAGACCAUCCUGGC | |
| | UAACACUGUGAAACCCCGCCUCUACUAAAAAUACAAAAAAAUUAGCCGGG | |
| | CAUGGUAGCACGCACCUGUAGUCCCAGCUACUCGGGAGGCUGAGGCAGGA | |
| | GAAUCGCUUGAACCCAGGAAGCAGAGGUUGCAGUGAGCUGAGAUUGCACC | |
| | ACCGUACUCAAGCCUGGGCUACAGAGCGAAAUUCCAUCUCAAAACAAACA | |
| | AACAAACAAUUACAAAAAUUAGCCAGGAGUGGUGGUGGGUGCCUAUAAUC | |
| | CCAGCUACUCAGGAGGCUUAGGCAGGAGAAUCGCUUGAAUCCAGGAGGCG | |
| | GAGGUUGCAGUGAGCCGAGAUCCUGCCACUGCGCUCCAGCCUGGCCACAG | |
| | AGCAAGACUCCAUCUCAGAAAAAAAAAAAAGAAAGAAAGAAAAGAAAAUC | |
| | UGUAGAAGAAUACGUAAGAAAGCACUAUUGGUAGUUAUUUCUGGAAGAUA | |
| | AGACUGAGAAGGAACAUGACAUUUACUUUUCACUUCAAUCCAUAGUAUUU | |
| | CUCUUGUCAUUAGAAUCAGAGAAUUUAUUGGUAUAAAAAUACCCAGGACU | |
| | CCUACCGUGGUAAUUUGAAAAUUUGUUUCCAGAUAGUCUAAAUAUAAAAC | |
| | ACUCUGGAAAAAGCUGCCUCAAUCCUGUCCCCUGGGACCCUCAGCAAGGG | |
| | GCCUGUUAACCACGAUUCCACUUCAGCAAAGAAGCCCCACCAGAAGGAAA | |
| | AAACCACGCACCAGCCAGGACUCUACGGGAGAGAGAAGCCCACCAAAGGC | |
| | UUUAGAGGAUAACAUCGCAGUUGUUCUCCAUGUUACUUUUUUCUCCAAGG | |
| | UAAGGAAUACACUCCUAAAUGUUCCUAAACUCAUUUUGCUAAUCUGAUUU | |
| | AUCAUAAUAACCCUCAAUAAAAGUCCUCCUUUGUAUUUAAGUUAAAACUC | |
| | UUUAUGUAACCUAUAAUUUUAGUUCUAUCAGGCUCACAGAAAGUUGGUCA | |
| | CCAUCCUCCCUAUUGUAAUUAAACACUCAAAUGCCUCCUAACGACUAAAG | |
| | AAAUUAAACCUAUAUAUCUAGGACCCAGGAGCCAAAACCGUAACAGCUCA | |
| | GACAAAAGCUUGAGUUUUUUUAAGUUUGUAUUUUAUAUUAACAAUUUUUU | |
| | AGCAUUUUACACUCUACUCCAUGAUAUAGCUAUAACUGAUUCCCACUAAA | |
| | AUAAUUUCUUCCUCUCCCCUCUCUUCUGGAAUAUUUGAAUAAAUUGAUAU | |
| | UCCAGGAAGAUGUGUCUUGUUUUCGCAAAGGCCACCCCCAACAACAUAUU | |
| | CCCUCAGAUUAUGCUUUCAUAUGACCUCAUCCCUCAGGCUUUUCUACUUU | |
| | UAAGUCAACCAUUUCUAAUUCUCUUAACCCAUAGACAUAGGUCCCAAUUU | |
| | UUCAAUUCUUCAAAUUUCCCCAUCAUUUUCCUCCAAAGCCUAUUCCACUU | |
| | AUCACUAACGCUCAAAUAAUGUGCUCUAAAAUUCACUGCAGUGCUCCAAU | |
| | GAGAUGCUGUUGGAAAGGGUCUCAAUUUAUGCUCCCAUUUUCUCUCCCCU | |
| | CAUAUUUGUACACCCACUGUUUAUUUGUACCUCUGUACUUCCUGGAAGGA | |
| | AGAACACAUUUAAUAAUCAAGCCAACUAGUAUUGCUGAGGCUUUCUACUA | |
| | AAAACUUGUAGAUCAUUGCAUAGAGCACAGCAGGACUGAUUAGUAUGCCA | |
| | GGGUGAAGACAUUGAAAAAAUAAACUAGAAAAGUCCAAGGGAAGUUGUGA | |
| | UAGACUGUGUGAAGUUUAGAAUAGAAAAUGGGUUCAUAAAUUAAGGAGAG | |
| | ACGUGGGAAAUUUUGCAAAUAUAUGCAUAAAGUGAACAGCCAAACGGUGA | |
| | GUUUCACCCAGUGUAACACCCAGCAUCUGUCCCAAUUUGAAGCCCUUACC | |
| | UUUAAGCAGGCCGGCCUGCCCAGCAGUUCACAUAGCCUCAGCGAGAGGGC | |
| | AUGCCAAGAAGUCUGCUUUGUUCCCCGGCCAAUGCUGGACCUUCCUGCCG | |
| | AGACAUGCCUCACACUCAUAUUUCCCAGCCUGUUCUAAUGACGCCAGCUC | |
| | UCAACUUCUCAGCUGCUGUCUCUGACUUUGCUCCUCUGUCCAAUGCCUGA | |
| | UAUUAUUGUAUCUCUGGGAUUAAGCCUUGGUUCCCUGAAAUUGCAUUCAC | |
| | CACAAACUACAUGUGCUUUUAGCUGCUCCAGAGAACAUCCUAGCAUAAUC | |
| | UGGCACAUCCUCUGGACAAAACCCUGGUUGGACCUAGCCAAUAAGACAGA | |
| | AGUUACUGCUGGGAUAAUCCCAGUUGCUGAAGAGGAAAACUAUGUUUAUC | |
| | UAUGCAUACUAAUAUGACUGAAAAAAUAUUUUCUUUAUUAAUCUAUGGAG | |
| | AAAAAUGUCCCUAACACAGUCUGGGACAAAAAUCACUUUACAAGGUUCUU | |
| | UACAACCUUCU | |

[0083] In some instances, one or more transposable elements are associated with conversion, generation, development or activity of CAF. In some instances, one or more transposable elements are associated with conversion, generation, development or activity of myCAF. In some instances, the transposable element regulates the differential expression of a RNA, a protein, or an element of a signaling pathway related to the initiation, development or function of CAF. In some instances, the transposable element regulates the differential expression of a RNA, a protein, or an element of a signaling pathway related to the initiation, development or function of myCAF. In some instances, one or more transposable elements are associated with the expression or activity of lncRNA disclosed herein. In some instances, the transposable element regulates the differential expression of the lncRNA disclosed herein. In some instances, the expression or activity level of the lncRNA disclosed herein is altered by change in expression level of the transposable element. In some instances, one or more transposable elements are within a genomic locus encoding the lncRNA disclosed herein.

[0084] In some instances, one or more enhancers (e.g., super-enhancers, binding sites of master transcription factors) are within a genomic locus encoding the lncRNA disclosed herein. In some instances, one or more super-enhancers (e.g., primary CAF super-enhancer) are within a genomic locus encoding the lncRNA disclosed herein. In some instances, one or more binding sites of transcription factors are within a genomic locus encoding the lncRNA. In some instances, the one or more enhancers comprise super-enhancers that are associated with the conversion, generation, development or activity of CAF. In some instances, the one or more enhancers comprise binding sites of master transcription factors that are associated with the conversion, generation, development or activity of CAF. In some instances, the master transcription factor comprises paired related homeobox 1 (PRRX1).

[0085] In some instances, one or more enhancers (e.g., super-enhancers, binding sites of master transcription factors) are located at most 10 nucleotides, at most 20 nucleotides, at most 30 nucleotides, at most 40 nucleotides, at most 50 nucleotides, at most 55 nucleotides, at most 60 nucleotides, at most 65 nucleotides, at most 70 nucleotides, at most 75 nucleotides, at most 80 nucleotides, at most 85 nucleotides, at most 90 nucleotides, at most 95 nucleotides, or at most 1000 nucleotides upstream from the genomic locus transcribing lncRNA disclosed herein. In some instances, one or more enhancers (e.g., super-enhancers, binding sites of master transcription factors) are located at least 10 nucleotides, at least 20 nucleotides, at least 30 nucleotides, at least 40 nucleotides, at least 50 nucleotides, at least 55 nucleotides, at least 60 nucleotides, at least 65 nucleotides, at least 70 nucleotides, at least 75 nucleotides, at least 80 nucleotides, at least 85 nucleotides at least 90 nucleotides, at least 95 nucleotides, at least 1000 nucleotides or more upstream from the genomic locus transcribing lncRNA disclosed herein. In some instances, one or more super-enhancers (e.g., primary CAF super-enhancer) are located at most 70 nucleotides, at most 75 nucleotides, at most 80 nucleotides, at most 85 nucleotides, at most 90 nucleotides, at most 95 nucleotides, at most 100 nucleotides, at most 150 nucleotides, at most 200 nucleotides, at most 250 nucleotides, at most 300 nucleotides, at most 350 nucleotides, at most 400 nucleotides, at most 450 nucleotides, at most 500 nucleotides, at most 550 nucleotides, at most 600 nucleotides, at most 650 nucleotides, at most 700 nucleotides, at most 750 nucleotides, at most 800 nucleotides, at most 850 nucleotides, at most 900 nucleotides, at most 950 nucleotides, or at most 1000 nucleotides upstream from the genomic locus transcribing lncRNA disclosed herein. In some instances, one or more super-enhancers (e.g., primary CAF super-enhancer) are located at least 10 nucleotides, at least 20 nucleotides, at least 30 nucleotides, at least 40 nucleotides, at least 50 nucleotides, at least 55 nucleotides, at least 60 nucleotides, at least 65 nucleotides, at least 70 nucleotides, at least 75 nucleotides, at least 80 nucleotides, at least 85 nucleotides, at least 90 nucleotides, at least 95 nucleotides, at least 1000 nucleotides or more upstream from the genomic locus transcribing lncRNA disclosed herein. In some instances, one or more binding sites of transcription factors are located at most 70 nucleotides, at most 75 nucleotides, at most 80 nucleotides, at most 85 nucleotides, at most 90 nucleotides, at most 95 nucleotides, at most 100 nucleotides, at most 150 nucleotides, at most 200 nucleotides, at most 250 nucleotides, at most 300 nucleotides, at most 350 nucleotides, at most 400 nucleotides, at most 450 nucleotides, at most 500 nucleotides, at most 550 nucleotides, at most 600 nucleotides, at most 650 nucleotides, at most 700 nucleotides, at most 750 nucleotides, at most 800 nucleotides, at most 850 nucleotides, at most 900 nucleotides, at most 950 nucleotides, or at most 1000 nucleotides upstream from the genomic locus transcribing lncRNA disclosed herein. In some instances, one or more binding sites of transcription factors are located at least 10 nucleotides, at least 20 nucleotides, at least 30 nucleotides, at least 40 nucleotides, at least 50 nucleotides, at least 55 nucleotides, at least 60 nucleotides, at least 65 nucleotides, at least 70 nucleotides, at least 75 nucleotides, at least 80 nucleotides, at least 85 nucleotides, at least 90 nucleotides, at least 95 nucleotides, at least 1000 nucleotides or more upstream from the genomic locus transcribing lncRNA disclosed herein.

[0086] In some instances, one or more enhancers (e.g., super-enhancers, binding sites of master transcription factors) are located at most 70 nucleotides, at most 75 nucleotides, at most about 80 nucleotides, at most 85 nucleotides, at most 90 nucleotides, at most 95 nucleotides, at most 100 nucleotides, at most 150 nucleotides, at most 200 nucleotides, at most 250 nucleotides, at most 300 nucleotides, at most 350 nucleotides, at most 400 nucleotides, at most 450 nucleotides, at most 500 nucleotides, at most 550 nucleotides, at most 600 nucleotides, at most 650 nucleotides, at most 700 nucleotides, at most 750 nucleotides, at most 800 nucleotides, at most 850 nucleotides, at most 900 nucleotides, at most 950 nucleotides, or at most 1000 nucleotides downstream from the genomic locus transcribing lncRNA disclosed herein. In some instances, one or more enhancers (e.g., super-enhancers, binding sites of master transcription factors) are located at least 10 nucleotides, at least 20 nucleotides, at least 30 nucleotides, at least 40 nucleotides, at least 50 nucleotides, at least 55 nucleotides, at least 60 nucleotides, at least 65 nucleotides, at least 70 nucleotides, at least 75 nucleotides, at least about 80 nucleotides, at least 85 nucleotides, at least 90 nucleotides, at least 95 nucleotides, at least 1000 nucleotides or more downstream from the genomic locus transcribing lncRNA disclosed herein. In some instances, one or more super-enhancers (e.g., primary CAF super-enhancer) are located at most 70 nucleotides, at most 75 nucleotides, at most 80 nucleotides, at most 85 nucleotides, at most 90 nucleotides, at most 95 nucleotides, at most 100 nucleotides, at most 150 nucleotides, at most 200 nucleotides, at most 250 nucleotides, at most 300 nucleotides, at most 350 nucleotides, at most 400 nucleotides, at most 450 nucleotides, at most 500 nucleotides, at most 550 nucleotides, at most 600 nucleotides, at most 650 nucleotides, at most 700 nucleotides, at most 750 nucleotides, at most 800 nucleotides, at most 850 nucleotides, at most 900 nucleotides, at most 950 nucleotides, or at most 1000 nucleotides downstream from the genomic locus transcribing lncRNA disclosed herein. In some instances, one or more super-enhancers (e.g., primary CAF super-enhancer) are located at least 10 nucleotides, at least 20 nucleotides, at least 30 nucleotides, at least 40 nucleotides, at least 50 nucleotides, at least 55 nucleotides, at least 60 nucleotides, at least 65 nucleotides, at least 70 nucleotides, at least 75 nucleotides, at least about 80 nucleotides, at least 85 nucleotides, at least 90 nucleotides, at least 95 nucleotides, at least 1000 nucleotides or more downstream from the genomic locus transcribing lncRNA disclosed herein. In some instances, one or more binding sites of transcription factors are located at most 70 nucleotides, at most 75 nucleotides, at most 80 nucleotides, at most 85 nucleotides, at most 90 nucleotides, at most 95 nucleotides, at most 100 nucleotides, at most 150 nucleotides, at most 200 nucleotides, at most 250 nucleotides, at most 300 nucleotides, at most 350 nucleotides, at most 400 nucleotides, at most 450 nucleotides, at most 500 nucleotides, at most 550 nucleotides, at most 600 nucleotides, at most 650 nucleotides, at most 700 nucleotides, at most 750 nucleotides, at most 800 nucleotides, at most 850 nucleotides, at most 900 nucleotides, at most 950 nucleotides, or at most 1000 nucleotides downstream from the genomic locus transcribing lncRNA disclosed herein. In some instances, one or more binding sites of transcription factors are located at least 10 nucleotides, at least 20 nucleotides, at least 30 nucleotides, at least 40 nucleotides, at least 50 nucleotides, at least 55 nucleotides, at least 60 nucleotides, at least 65 nucleotides, at least 70 nucleotides, at least 75 nucleotides, at least about 80 nucleotides, at least 85 nucleotides, at least 90 nucleotides, at least 95 nucleotides, at least 1000 nucleotides or more downstream from the genomic locus transcribing lncRNA disclosed herein.

[0087] In some instances, one or more protein-coding genes are located within the genomic locus encoding the lncRNA disclosed herein. In some instances, one or more protein-coding genes that are associated with conversion, generation, development, activity, or function of the CAF are located within the genomic locus encoding the lncRNA disclosed herein. In some instances, one or more protein-coding genes that are associated with a pro-tumorigenic or fibrosis development function of the CAF are located within the genomic locus encoding the lncRNA disclosed herein. In some instances, one or more protein-coding genes of LRRC15 (NM_001135057), COL12A1 (NM_004370), DYRK2 (NM 003583), FN1 (NM 212482), or CAPN9 (NM_006615) are located within the genomic locus encoding the lncRNA disclosed herein. In some instances, one or more protein-coding genes of LRRC15 (NM_001135057), COL12A1 (NM_004370), DYRK2 (NM 003583), FN1 (NM_212482), or CAPN9 (NM 006615) are located upstream of the lncRNA disclosed herein. In some instances, one or more protein-coding genes of LRRC15 (NM 001135057), COL12A1 (NM_004370), DYRK2 (NM_003583), FN1 (NM 212482), or CAPN9 (NM_006615) are downstream of the lncRNA disclosed herein.

[0088] In some instances, one or more protein-coding genes that are associated with conversion, generation, development, activity, or function of the CAF are located at most 70 nucleotides, at most 75 nucleotides, at most 80 nucleotides, at most 85 nucleotides, at most 90 nucleotides, at most 95 nucleotides, at most 100 nucleotides, at most 150 nucleotides, at most 200 nucleotides, at most 250 nucleotides, at most 300 nucleotides, at most 350 nucleotides, at most 400 nucleotides, at most 450 nucleotides, at most 500 nucleotides, at most 550 nucleotides, at most 600 nucleotides, at most 650 nucleotides, at most 700 nucleotides, at most 750 nucleotides, at most 800 nucleotides, at most 850 nucleotides, at most 900 nucleotides, at most 950 nucleotides, or at most 1000 nucleotides upstream from the genomic locus transcribing lncRNA disclosed herein. In some instances, one or more protein-coding genes that are associated with the CAF are located at least 10 nucleotides, at least 20 nucleotides, at least 30 nucleotides, at least 40 nucleotides, at least 50 nucleotides, at least 55 nucleotides, at least 60 nucleotides, at least 65 nucleotides, at least 70 nucleotides, at least 75 nucleotides, at least 80 nucleotides, at least 85 nucleotides, at least 90 nucleotides, at least 95 nucleotides, at least 1000 nucleotides or more upstream from the genomic locus transcribing lncRNA disclosed herein. In some instances, one or more protein-coding genes that are associated with a pro-tumorigenic or fibrosis development function of the CAF are located at most 10 nucleotides, at most 20 nucleotides, at most 30 nucleotides, at most 40 nucleotides, at most 50 nucleotides, at most 55 nucleotides, at most 60 nucleotides, at most 65 nucleotides, at most 70 nucleotides, at most 75 nucleotides, at most 80 nucleotides, at most 85 nucleotides, at most 90 nucleotides, at most 95 nucleotides, or at most 1000 nucleotides upstream of the lncRNA disclosed herein. In some instances, one or more protein-coding genes that are associated with a pro-tumorigenic or fibrosis development function of the CAF are located at least 10 nucleotides, at least 20 nucleotides, at least 30 nucleotides, at least 40 nucleotides, at least 50 nucleotides, at least 55 nucleotides, at least 60 nucleotides, at least 65 nucleotides, at least 70 nucleotides, at least 75 nucleotides, at least 80 nucleotides, at least 85 nucleotides, at least 90 nucleotides, at least 95 nucleotides, at least 1000 nucleotides or more upstream from the genomic locus transcribing lncRNA disclosed herein.

[0089] In some instances, one or more protein-coding genes that are associated with the CAF are located at most 10 nucleotides, at most 20 nucleotides, at most 30 nucleotides, at most 40 nucleotides, at most 50 nucleotides, at most 55 nucleotides, at most 60 nucleotides, at most 65 nucleotides, at most 70 nucleotides, at most 75 nucleotides, at most 80 nucleotides, at most 85 nucleotides, at most 90 nucleotides, at most 95 nucleotides, or at most 1000 nucleotides downstream of the lncRNA disclosed herein. In some instances, one or more protein-coding genes that are associated with the CAF are located at least 10 nucleotides, at least 20 nucleotides, at least 30 nucleotides, at least 40 nucleotides, at least 50 nucleotides, at least 55 nucleotides, at least 60 nucleotides, at least 65 nucleotides, at least 70 nucleotides, at least 75 nucleotides, at least 80 nucleotides, at least 85 nucleotides, at least 90 nucleotides, at least 95 nucleotides, at least 1000 nucleotides or more downstream from the genomic locus transcribing lncRNA disclosed herein. In some instances, one or more protein-coding genes that are associated with a pro-tumorigenic or fibrosis development function of the CAF are located at most 10 nucleotides, at most 20 nucleotides, at most 30 nucleotides, at most 40 nucleotides, at most 50 nucleotides, at most 55 nucleotides, at most 60 nucleotides, at most 65 nucleotides, at most 70 nucleotides, at most 75 nucleotides, at most 80 nucleotides, at most 85 nucleotides, at most 90 nucleotides, at most 95 nucleotides, or at most 1000 nucleotides downstream from the genomic locus transcribing lncRNA disclosed herein. In some instances, one or more protein-coding genes that are associated with a pro-tumorigenic or fibrosis development function of the CAF are located at least 10 nucleotides, at least 20 nucleotides, at least 30 nucleotides, at least 40 nucleotides, at least 50 nucleotides, at least 55 nucleotides, at least 60 nucleotides, at least 65 nucleotides, at least 70 nucleotides, at least 75 nucleotides, at least 80 nucleotides, at least 85 nucleotides, at least 90 nucleotides, at least 95 nucleotides, at least 1000 nucleotides or more downstream from the genomic locus transcribing lncRNA disclosed herein.

[0090] In some instances, epigenetic modifications or changes are present within the genomic locus of the lncRNA disclosed herein. In some instances, epigenetic modifications or changes comprises H3K27ac, H3K4me3, H3K4me1, H4K16ac, H3K27me3, H3K79me2, H3K36me3, H2AFZ, H3K9ac, H3K4me2, H4K20me1, H2BK120ac, H3K56ac, H2AK9ac, H3K18ac, H4K5ac, H2AK5ac, H3K9me1, H3K4ac, H2BK5ac, H3K14ac, H3K79me1, H3K23ac, H2BK15ac, H3K4me2, H2BK12ac, H4K91ac, H4K20me1, H2BK20ac, H4K8ac, or a combination thereof. In some instances, H3K27ac modifications are present within the genomic locus encoding the lncRNA disclosed herein. In some instances, such epigenetic modifications or changes can be used as a marker to identify the genomic locations transcribing the lncRNAs as described herein.

[0091] In some instances, the lncRNA disclosed herein modulates contractile, ECM remodeling, ECM production or combinations thereof. In some instances, the lncRNA disclosed herein modulates ECM structure organization. In some instances, the lncRNA disclosed herein modulates extracellular matrix organization. In some instances, the lncRNA disclosed herein modulates extracellular structure organization. In some instances, the lncRNA disclosed herein modulates external encapsulating structure organization. In some instances, the lncRNA disclosed herein modulates the expression and/or components of ECM. Non-limiting examples of components of ECM include collagen, elastin, reticulin, associated-microfibrils, fibronectin, laminin, proteoglycan, proteoglycan polymer, glycoconjugate, glycosaminoglycan, or variants thereof. In some instances, the lncRNA disclosed herein modulates GTPase activity. In some instances, the lncRNA disclosed herein modulates activation of GTPase activity. Non-limiting examples of GTPase activity include signal transduction in response to activation of cell surface markers (e.g., transmembrane receptors), protein biosynthesis, regulation of cell differentiation, regulation of cell proliferation, regulation of cell division, regulation of cell movement, translocation of proteins, transportation of vesicles within cell or variations thereof. In some instances, the lncRNA disclosed herein modulates GTPase expression. In some instances, the lncRNA disclosed herein modulates GTP expression. In some instances, the lncRNA disclosed herein modulates the ability of GTPase to bind to GTP. In some instances, the lncRNA disclosed herein regulates genes involved in ECM structure organization, and/or GTPase activity. In some instances, the lncRNA disclosed herein induces or facilitates transition of fibroblast to CAFs. In some instances, the lncRNA disclosed herein induces or facilitates transition of fibroblast to myCAFs. In some instances, the lncRNA disclosed herein regulate metastasis formation and/or drug resistance. In some instances, the lncRNA disclosed herein increases expression of one or more markers of myCAFs in CAFs compared to control (e.g., cells with substantially no or low presence of lncRNA disclosed herein, or fibroblasts that are not associated with cancer). In some instances, the lncRNA disclosed herein increases expression of one or more genes in listed in Table 1 or Table 13 in CAFs compared to fibroblasts that are not associated with cancer. In some instances, the lncRNA disclosed herein increases expression of one or more genes listed in Table 1 or Table 13 in CAFs compared to CAFs without an activated TGFβ pathway. In some instances, the lncRNA disclosed herein increases expression of one or more genes listed in Table 1 or Table 13 in HDFs treated with TGFβ with or without starvation compared to HDFs without TGFβ treatment. In some instances, the lncRNA disclosed herein increases expression of one or more ECM-modulatory gene in CAFs when compared to a fibroblast that is not associated with cancer. ECM-modulatory genes comprise markers of myCAFs. Non-limiting examples of ECM-modulatory genes are LRRC15 (NM_001135057), MMP11 (NM 005940), COL11A1 (NM 080629), C1QTNF3 (NM 030945), CTHRC1 (NM_138455), COL12A1 (NM 004370), COL10A1 (NM 00493), COL5A2 (NM_000393), THBS2 (NM 003247), AEBP1 (NM 001129), ITGA11 (NM_001004439), PDPN (NM_006474), FAP (NM_004460), COL8A1 (NM 001850), COL1A1 (NM 000088), COL1A2 (NM_000089), FN1 (NM_212482), or POSTN (NM_006475). In some instances, higher expression of ECM-modulatory gene expression is associated with poor response to checkpoint blockade treatment, standard-of-care chemotherapy treatments of cancers, or a combination thereof. In some instances, higher expression of ECM-modulatory gene expression is associated with poor response to checkpoint blockade treatment of cancers.

### Modulators

[0092] In some aspects, the modulator disclosed herein is a modulator of lncRNAs (e.g., myCAF lncRNAs). In some instances, the modulator inhibits the transcription or decreases the amount of transcripts of the lncRNA. In some instances, the modulator upregulates the transcription or activity of the lncRNA. In some aspects, the modulator disclosed herein is a nucleic acid editing or modifying moiety. In some instances, the nucleic acid editing or modifying moiety targets the genomic region disclosed herein. In some instances, the nucleic acid editing or modifying moiety targets the long noncoding transcript. In some instances, the nucleic acid editing or modifying moiety targets a premature form of the long noncoding transcript.

[0093] In some aspects, the nucleic acid editing or modifying moiety is a programmable nucleic acid sequence specific endonuclease. In some instances, the nucleic acid editing or modifying moiety is a nucleic acid guided endonuclease. In some instances, the nucleic acid editing or modifying moiety is a CRISPR-based moiety. In other instances, the nucleic acid editing or modifying moiety is a meganuclease-based tool. In other instances, the nucleic acid editing or modifying moiety is a zinc finger nuclease (ZFN)-based moiety. In other aspects, the nucleic acid editing or modifying moiety is a transcription activator-like effector-based nuclease (TALEN)-based moiety. In other instances, the nucleic acid editing or modifying moiety is an Argonaute system.

[0094] In some aspects, the CRISPR-based moiety disclosed herein is a Type I, Type II, Type III, Type IV, Type V, or Type VI CRISPR system. CRISPR/Cas systems may be multi-protein systems or single effector protein systems. Multi-protein, or Class 1, CRISPR systems include Type I, Type III, and Type IV systems. In some instances, Class 2 systems include a single effector molecule and include Type II, Type V, and Type VI. In some aspects, the CRISPR-based moiety disclosed herein comprises a single or multiple effector proteins. An effector protein may comprise one or multiple nuclease domains. An effector protein may target DNA or RNA, and the DNA or RNA may be single stranded or double stranded. Effector proteins may generate double strand or single strand breaks. Effector proteins may comprise mutations in a nuclease domain thereby generating a nickase protein. Effector proteins may comprise mutations in one or more nuclease domains, thereby generating a catalytically dead nuclease that is able to bind but not cleave a target sequence.

[0095] In some aspects, the CRISPR-based moiety disclosed comprises a single or multiple guiding RNAs (gRNAs). In some instances, the gRNA disclosed herein targets a portion of chr3:194355288 to chr3:194370349 on the sense strand. In some instances, the gRNA disclosed herein targets a portion of chr3:194355288 to chr3:194370349 on the antisense strand. In some instances, the gRNA disclosed herein targets a portion upstream of chr3:194355288 to chr3:194370349. In some instances, the gRNA disclosed herein targets a portion downstream of chr3:194355288 to chr3:194370349. In some instances, the gRNA disclosed herein targets a portion of chr3:194355288 to chr3:194358966 on the sense strand. In some instances, the gRNA disclosed herein targets a portion of chr3:194355288 to chr3:194358966 on the antisense strand. In some instances, the gRNA disclosed herein targets a portion upstream of chr3:194355288 to chr3:194358966. In some instances, the gRNA disclosed herein targets a portion downstream of chr3:194355288 to chr3:194358966. In some instances, the gRNA disclosed herein targets a portion of chr3:194368496 to chr3:194370349 on the sense strand. In some instances, the gRNA disclosed herein targets a portion of chr3:194368496 to chr3:194370349 on the antisense strand. In some instances, the gRNA disclosed herein targets a portion upstream of chr3:194368496 to chr3:194370349. In some instances, the gRNA disclosed herein targets a portion downstream of chr3:194368496 to chr3:194370349. In some instances, the gRNA disclosed herein targets a portion of chr6:74958809 to chr6:75026433 on the sense strand. In some instances, the gRNA disclosed herein targets a portion of chr6:74958809 to chr6:75026433 on the antisense strand. In some instances, the gRNA disclosed herein targets a portion upstream of chr6:74958809 to chr6:75026433. In some instances, the gRNA disclosed herein targets a portion downstream of chr6:74958809 to chr6:75026433. In some instances, the gRNA disclosed herein targets a portion of chr1:66390975 to chr1:66516344 on the sense strand. In some instances, the gRNA disclosed herein targets a portion of chr1:66390975 to chr1:66516344 on the antisense strand. In some instances, the gRNA disclosed herein targets a portion upstream of chr1:66390975 to chr1:66516344. In some instances, the gRNA disclosed herein targets a portion downstream of chr1:66390975 to chr1:66516344. In some instances, the gRNA disclosed herein targets a portion of chr12:67394371 to chr12:67455635 on the sense strand. In some instances, the gRNA disclosed herein targets a portion of chr12:67394371 to chr12:67455635 on the antisense strand.

[0096] In some instances, the gRNA disclosed herein targets a portion of chr12:67394371 to chr12:67455635. In some instances, the gRNA disclosed herein targets a portion of chr12:67394371 to chr12:67590771 on the sense strand. In some instances, the gRNA disclosed herein targets a portion of chr12:67394371 to chr12:67590771 on the antisense strand. In some instances, the gRNA disclosed herein targets a portion upstream of chr12:67394371 to chr12:67590771. In some instances, the gRNA disclosed herein targets a portion downstream of chr12:67394371 to chr12:67590771. In some instances, the gRNA disclosed herein targets a portion of chr9:87219871 to chr9:87277312 on the sense strand. In some instances, the gRNA disclosed herein targets a portion of chr9:87219871 to chr9:87277312 on the antisense strand. In some instances, the gRNA disclosed herein targets a portion upstream of chr9:87219871 to chr9:87277312. In some instances, the gRNA disclosed herein targets a portion downstream of chr9:87219871 to chr9:87277312. In some instances, the gRNA disclosed herein targets a portion of chr2:215718043 to chr2:215720944 on the sense strand. In some instances, the gRNA disclosed herein targets a portion of chr2:215718043 to chr2:215720944 on the antisense strand. In some instances, the gRNA disclosed herein targets a portion upstream of chr2:215718043 to chr2:215720944. In some instances, the gRNA disclosed herein targets a portion downstream of chr2:215718043 to chr2:215720944. In some instances, the gRNA disclosed herein targets a portion of chr1:230710698 to chr1:230795492 on the sense strand. In some instances, the gRNA disclosed herein targets a portion of chr1:230710698 to chr1:230795492 on the antisense strand. In some instances, the gRNA disclosed herein targets a portion upstream of chr1:230710698 to chr1:230795492. In some instances, the gRNA disclosed herein targets a portion downstream of chr1:230710698 to chr1:230795492. The gRNA may comprise a crRNA. The gRNA may comprise a chimeric RNA with crRNA and tracrRNA sequences. The gRNA may comprise a separate crRNA and tracrRNA. Target nucleic acid sequences may comprise a protospacer adjacent motif (PAM) or a protospacer flanking site (PFS). The PAM or PFS may be 3′ or 5′ of the target or protospacer site. Cleavage of a target sequence may generate blunt ends, 3′ overhangs, or 5′ overhangs.

[0097] The gRNA disclosed herein may comprise a spacer sequence. Spacer sequences may be complementary to target sequences or protospacer sequences. Spacer sequences may be 10, 11, 12, 13, 14, 15, 16, 17, 18, 19, 20, 21, 22, 23, 24, 25, 26, 27, 28, 29, 30, 31, 32, 33, 34, 35, or 36 nucleotides in length. In some aspects, the spacer sequence may be less than 10 or more than 36 nucleotides in length.

[0098] The gRNA disclosed herein may comprise a repeat sequence. In some aspects, the repeat sequence is part of a double stranded portion of the gRNA. A repeat sequence may be 10, 11, 12, 13, 14, 15, 16, 17, 18, 19, 20, 21, 22, 23, 24, 25, 26, 27, 28, 29, 30, 31, 32, 33, 34, 35, 36, 37, 38, 39, 40, 41, 42, 43, 44, 45, 46, 47, 48, 49, or 50 nucleotides in length. In some aspects, the spacer sequence may be less than 10 or more than 50 nucleotides in length.

[0099] The gRNA disclosed herein may comprise one or more synthetic nucleotides, non-naturally occurring nucleotides, nucleotides with a modification, deoxyribonucleotide, or any combination thereof. Additionally and/or alternatively, a gRNA may comprise a hairpin, linker region, single stranded region, double stranded region, or any combination thereof. Additionally or alternatively, a gRNA may comprise a signaling or reporter molecule.

[0100] The gRNA disclosed herein may be encoded by genetic or episomal DNA. The gRNA disclosed herein may be provided or delivered concomitantly with a CRISPR nuclease or sequentially. The gRNA disclosed herein may be chemically synthesized, in vitro transcribed or otherwise generated using standard RNA generation techniques known in the art.

[0101] The CRISPR-based moiety disclosed herein can be a Type II CRISPR system, for example a Cas9 system. The Type II nuclease can comprise a single effector protein, which, In some aspects, comprises a RuvC and HNH nuclease domains. In some aspects, a functional Type II nuclease may comprise two or more polypeptides, each of which comprises a nuclease domain or fragment thereof. The target nucleic acid sequences may comprise a 3′ protospacer adjacent motif (PAM). In some aspects, the PAM may be 5′ of the target nucleic acid. Guide RNAs (gRNA) may comprise a single chimeric gRNA, which contains both crRNA and tracrRNA sequences. In some instances, the gRNA may comprise a set of two RNAs, for example a crRNA and a tracrRNA. The Type II nuclease may generate a double strand break, which in some cases creates two blunt ends. In some aspects, the Type II CRISPR nuclease is engineered to be a nickase such that the nuclease only generates a single strand break. In such cases, two distinct nucleic acid sequences may be targeted by gRNAs such that two single strand breaks are generated by the nickase. In some aspects, the two single strand breaks effectively create a double strand break. In some aspects, where a Type II nickase is used to generate two single strand breaks, the resulting nucleic acid free ends may either be blunt, have a 3′ overhang, or a 5′ overhang. In some aspects, a Type II nuclease may be catalytically dead such that it binds to a target sequence, but does not cleave. For example, a Type II nuclease may have mutations in both the RuvC and HNH domains, thereby rendering both nuclease domains non-functional. A Type II CRISPR system may be one of three sub-types, namely Type II-A, Type II-B, or Type II-C.

[0102] The CRISPR-based moiety disclosed herein can be a Type V CRISPR system, for example a Cpf1, C2c1, or C2c3 system. The Type V nuclease may comprise a single effector protein, which comprises a single RuvC nuclease domain. In other cases, a function Type V nuclease comprises a RuvC domain split between two or more polypeptides. In such cases, the target nucleic acid sequences may comprise a 5′ PAM or 3′ PAM. Guide RNAs (gRNA) may comprise a single gRNA or single crRNA, such as may be the case with Cpf1. In some aspects, a tracrRNA is not needed. In other examples, such as when C2c1 is used, a gRNA may comprise a single chimeric gRNA, which contains both crRNA and tracrRNA sequences or the gRNA may comprise a set of two RNAs, for example a crRNA and a tracrRNA. The Type V CRISPR nuclease may generate a double strand break, which generates a 5′ overhang. In some aspects, the Type V CRISPR nuclease is engineered to be a nickase such that the nuclease only generates a single strand break. In such cases, two distinct nucleic acid sequences may be targeted by gRNAs such that two single strand breaks are generated by the nickase. In some aspects, the two single strand breaks effectively create a double strand break. In some aspects where a Type V nickase is used to generate two single strand breaks, the resulting nucleic acid free ends may either be blunt, have a 3′ overhang, or a 5′ overhang. In some aspects, a Type V nuclease may be catalytically dead such that it binds to a target sequence, but does not cleave. For example, a Type V nuclease may have mutations a RuvC domain, thereby rendering the nuclease domain non-functional.

[0103] The CRISPR-based moiety disclosed herein may be a Type VI CRISPR system, for example a C2c2 system. A Type VI nuclease may comprise a HEPN domain. In some aspects, the Type VI nuclease comprises two or more polypeptides, each of which comprises a HEPN nuclease domain or fragment thereof. In such cases, the target nucleic acid sequences may by RNA, such as single stranded RNA. When using Type VI CRISPR system, a target nucleic acid may comprise a protospacer flanking site (PFS). The PFS may be 3′ or 5′ or the target or protospacer sequence. Guide RNAs (gRNA) may comprise a single gRNA or single crRNA. In some aspects, a tracrRNA is not needed. In other examples, a gRNA may comprise a single chimeric gRNA, which contains both crRNA and tracrRNA sequences or the gRNA may comprise a set of two RNAs, for example a crRNA and a tracrRNA. In some aspects, a Type VI nuclease may be catalytically dead such that it binds to a target sequence, but does not cleave.

[0104] For example, a Type VI nuclease may have mutations in a HEPN domain, thereby rendering the nuclease domains non-functional.

[0105] Non-limiting examples of suitable nucleases, including nucleic acid-guided nucleases, for use in the present disclosure include C2c1, C2c2, C2c3, CasI, Cas1B, Cas2, Cas3, Cas4, Cas5, Cas6, Cas7, Cas8, Cas9 (also known as Csnl and Csxl2), CasIO, Cpf1, Csyl, Csy2, Csy3, Csel, Cse2, Cscl, Csc2, Csa5, Csn2, Csm2, Csm3, Csm4, Csm5, Csm6, Cmrl, Cmr3, Cmr4, Cmr5, Cmr6, Csbl, Csb2, Csb3, Csx17, Csx14, Csx100, Csx16, CsaX, Csx3, Csxl, Csx15, Csfl, Csf2, Csf3, Csf4, homologues thereof, orthologues thereof, or modified versions thereof.

[0106] In some aspects, The CRISPR-based moiety disclosed herein is an Argonaute (Ago) system. Ago protein may be derived from a prokaryote, eukaryote, or archaea. The target nucleic acid may be RNA or DNA. A DNA target may be single stranded or double stranded. In some aspects, the target nucleic acid does not require a specific target flanking sequence, such as a sequence equivalent to a protospacer adjacent motif or protospacer flanking sequence. The Ago protein may create a double strand break or single strand break. In some aspects, when an Ago protein forms a single strand break, two Ago proteins may be used in combination to generate a double strand break. In some aspects, an Ago protein comprises one, two, or more nuclease domains. In some aspects, an Ago protein comprises one, two, or more catalytic domains. One or more nuclease or catalytic domains may be mutated in the Ago protein, thereby generating a nickase protein capable of generating single strand breaks. In other aspects, mutations in one or more nuclease or catalytic domains of an Ago protein generates a catalytically dead Ago protein that may bind but not cleave a target nucleic acid.

[0107] Ago proteins may be targeted to target nucleic acid sequences by a guiding nucleic acid. In some aspects, the guiding nucleic acid is a guide DNA (gDNA). The gDNA may have a 5′ phosphorylated end. The gDNA may be single stranded or double stranded. Single stranded gDNA may be 10, 11, 12, 13, 14, 15, 16, 17, 18, 19, 20, 21, 22, 23, 24, 25, 26, 27, 28, 29, 30, 31, 32, 33, 34, 35, 36, 37, 38, 39, 40, 41, 42, 43, 44, 45, 46, 47, 48, 49, or 50 nucleotides in length. In some aspects, the gDNA may be less than 10 nucleotides in length. In some aspects, the gDNA may be more than 50 nucleotides in length.

[0108] Argonaute-mediated cleavage may generate blunt end, 5′ overhangs, or 3′ overhangs. In some aspects, one or more nucleotides are removed from the target site during or following cleavage.

[0109] In some aspects, the nucleic acid editing or modifying moiety is a repressive dCas9 with the aid of a (single) guide RNA targeting the portion of the genomic region that is transcribed to the long noncoding transcript. In some instances, the nucleic acid editing or modifying moiety is dCas9-KRAB-MECP2 with the aid of a (single) guide RNA targeting the portion of the genomic region that is transcribed to the long noncoding transcript. In other specific aspects, the nucleic acid editing or modifying moiety is dCas9-KRAB-DNMT1 with the aid of a (single) guide RNA targeting the portion of the genomic region that is transcribed to the long noncoding transcript. In the above-mentioned aspects, the (single) guide RNA targets 5′ side of an enhancer region the genomic region that is transcribed to the long noncoding transcript. In the certain aspects, the (single) guide RNA targets 5′ side of an enhancer region the genomic region that is transcribed to the long noncoding transcript.

[0110] In some aspects, the modulator disclosed herein is a CRISPRi complex comprising a dCas9 and an sgRNA. In some aspects, the modulator disclosed herein is a dCas9 and an sgRNA targeting transcription starting site of the lncRNA disclosed herein, thereby the transcription of the lncRNA is inhibited. In some aspects, the sgRNA is designed using CRISPick (https://portals.broadinstitute.org/gppx/crispick/public) from the Broad institute. In some aspects, the sgRNA is designed to target −150 bp and +300 bp of the annotated transcriptional start site of the lncRNA disclosed herein. In some aspects, the sgRNA is designed to target −150 bp and +300 bp of the potential transcriptional start site of the lncRNA disclosed herein.

[0111] In some aspects, the modulator disclosed herein is a synthetic or an artificial oligonucleotide or a polynucleotide. In specific aspects, the synthetic or artificial oligonucleotide or polynucleotide is a small interfering RNA (siRNA), a microRNA (miRNA), an inhibitory double stranded RNA (dsRNA), a small or short hairpin RNA (shRNA), an antisense oligonucleotide (ASO), a piwi-interacting RNA (piRNA), a heterogeneous nuclear RNA (hnRNA), a small nuclear RNA (snRNA), an enzymatically-prepared siRNA (esiRNA), or the precursors thereof. In some instances, the nucleic acid molecule is an ASO. In some instances, the ASO is a gapmer or a mixmer. In some instances, the ASO is a modified oligonucleotide. In some instances, the ASO is a DNA analogue. In some instances, the ASO is modified with morpholino nucleotides. In some instances, the ASO is a phosphorodiamidate morpholino oligomer (PMO). In some instances, the nucleic acid molecule is single-stranded. In some instances, the nucleic acid is double-stranded.

[0112] In some instances, the ASO is about 6-50 nucleotides long. In some instances, the ASO is about 6-45, 6-40, 6-35, 6-30, 6-20, 6-18, 7-45, 7-40, 7-35, 7-30, 7-20, 7-18, 8-45, 8-40, 8-35, 8-30, 8-20, 8-18, 9-45, 9-40, 9-35, 9-30, 9-20, 9-18, 10-45, 10-40, 10-35, 10-20, 10-18, 11-30, 11-45, 11-40, 11-35, 11-30, 11-20, 11-18, 12-45, 12-40, 12-35, 12-30, 12-20, or 12-18 nucleotides long. In some instances, the ASO is about 12-30 nucleotides long. In some instances, the ASO is at least 6, 7, 8, 9, or 10 nucleotides long. In some instances, the ASO is at most 18, 20, 30, 35, 40, 45, 50, 55, or 60 nucleotides long.

[0113] In some instances, the modulator disclosed herein (e.g., ASO) targets the lncRNA transcribed from a genomic region or a subset thereof listed in Table 10 or Table 12. In some instances, the modulator disclosed herein (e.g., ASO) targets the lncRNA comprising a sequence or a fragment thereof listed in Table 11. In some instances, the modulator disclosed herein (e.g., ASO) targets the lncRNA sharing at least 80%, 85%, 90% or 95% sequence homology with a full-length sequence listed in Table 11. In some instances, the modulator disclosed herein (e.g., ASO) targets the lncRNA sharing at least 80%, 85%, 90% or 95% sequence homology with a fragment of a sequence listed in Table 11.

[0114] In some instances, the ASO comprises a sequence from SEQ ID NOs: 1-40. In some instances, the ASO comprises SEQ ID NO: 4. In some instances, the ASO comprises SEQ ID NO: 5. In some instances, the ASO comprises SEQ ID NO: 15. In some instances, the ASO comprises SEQ ID NO: 19. In some instances, the ASO comprises SEQ ID NO: 2. In some instances, the ASO comprises SEQ ID NO: 16. In some instances, the ASO comprises SEQ ID NO: 18. In some instances, the ASO comprises SEQ ID NO: 24. In some instances, the ASO comprises SEQ ID NO: 25. In some instances, the ASO comprises SEQ ID NO: 26. In some instances, the ASO comprises SEQ ID NO: 34. In some instances, the ASO comprises SEQ ID NO: 38. In some instances, the ASO comprises SEQ ID NO: 39. In some instances, the ASO comprises SEQ ID NO: 40. In some instances, the ASO comprises SEQ ID NO: 9. In some instances, the ASO comprises SEQ ID NO: 10. In some instances, the ASO comprises SEQ ID NO: 11. In some instances, the ASO comprises at least 9 consecutive nucleotides with no more than 1 mismatch from one of SEQ ID NOs: 1-40. In some instances, the ASO comprises at least 9 consecutive nucleotides with no more than 2 mismatches from one of SEQ ID NOs: 1-40. In some instances, the ASO comprises at least 9 consecutive nucleotides with no more than 3 mismatches from one of SEQ ID NOs: 1-40. In some instances, the ASO comprises at least 10 consecutive nucleotides with no more than 1 mismatch from one of SEQ ID NOs: 1-40. In some instances, the ASO comprises at least 10 consecutive nucleotides with no more than 2 mismatches from one of SEQ ID NOs: 1-40. In some instances, the ASO comprises at least 10 consecutive nucleotides with no more than 3 mismatches from one of SEQ ID NOs: 1-40. In some instances, the ASO comprises at least 11 consecutive nucleotides with no more than 1 mismatch from one of SEQ ID NOs: 1-40. In some instances, the ASO comprises at least 11 consecutive nucleotides with no more than 2 mismatches from one of SEQ ID NOs: 1-40. In some instances, the ASO comprises at least 11 consecutive nucleotides with no more than 3 mismatches from one of SEQ ID NOs: 1-40. In some instances, the ASO comprises at least 12 consecutive nucleotides with no more than 1 mismatch from one of SEQ ID NOs: 1-40. In some instances, the ASO comprises at least 12 consecutive nucleotides with no more than 2 mismatches from one of SEQ ID NOs: 1-40. In some instances, the ASO comprises at least 12 consecutive nucleotides with no more than 3 mismatches from one of SEQ ID NOs: 1-40. In some instances, the ASO comprises at least 13 consecutive nucleotides with no more than 1 mismatch from one of SEQ ID NOs: 1-40. In some instances, the ASO comprises at least 13 consecutive nucleotides with no more than 2 mismatches from one of SEQ ID NOs: 1-40. In some instances, the ASO comprises at least 13 consecutive nucleotides with no more than 3 mismatches from one of SEQ ID NOs: 1-40. In some instances, the ASO comprises a nucleic acid sequence of 80%, at least 85%, at least 90%, at least 95% identical to a sequence from SEQ ID NOs: 1-40. Table 2 shows sequences of ASO candidates targeting lncRNAs disclosed herein.

TABLE 2
Sequences of exemplary ASO candidates
targeting IncRNAs

| SEQ | | | |
|---|---|---|---|
| ID | ASO | | |
| NO: | name | ASO sequence | Target |
| 1 | SEAL1_ | GGGAATTGGGCTGTAT | human |
| | G1 | | XLOC_055514 |
| 2 | SEAL1_ | TGGTGTTCAATAGGCT | human |
| | G2 | | XLOC_055514 |
| 3 | SEAL1_ | GAAACCTCATCATCCG | human |
| | G3 | | XLOC_055514 |
| 4 | SEAL1_ | GAAGTTAGGCTCATGG | human |
| | G4 | | XLOC_055514 |
| 5 | SEAL1_ | GGTCTGGTTAGGAGTT | human |
| | G5 | | XLOC_055514 |
| 6 | SEAL1_ | TTATATCTGGAGACCC | human |
| | G6 | | XLOC_055514 |
| 7 | SEAL1_ | GATAGTGTATGGCTTG | human |
| | G7 | | XLOC_055514 |
| 8 | SEAL1_ | CAGTCACACGAATACC | human |
| | G8 | | XLOC_055514 |
| 9 | SEAL9_ | GATAACTCCTGCAAGT | human |
| | G1 | | XLOC_055515 |
| 10 | SEAL9_ | GATTGACCGTTCTGGA | human |
| | G2 | | XLOC_055515 |
| 11 | SEAL9_ | CTATGTGTACCCTGTA | human |
| | G3 | | XLOC_055515 |
| 12 | SEAL2_ | GTGCCTTGTGACTAGT | human |
| | G1 | | XLOC_069921 |
| 13 | SEAL2_ | CCCATTAGCCTATATG | human |
| | G2 | | XLOC_069921 |
| 14 | SEAL2_ | ATGTTAGTCCTCCTAG | human |
| | G3 | | XLOC_069921 |
| 15 | SEAL2_ | ATGTCCAATCCTACAC | human |
| | G4 | | XLOC_069921 |
| 16 | SEAL2_ | GTCTTTGACCAGTGTA | human |
| | G5 | | XLOC_069921 |
| 17 | SEAL2_ | GATCTAACTATCCACC | human |
| | G6 | | XLOC_069921 |
| 18 | SEAL2_ | CTGTGTGGAACTTATC | human |
| | G7 | | XLOC_069921 |
| 19 | SEAL2_ | ATGATATGCACCATCC | human |
| | G8 | | XLOC_069921 |
| 20 | SEAL3_ | GGTCTCACTAAAGGGT | human |
| | G1 | | XLOC_005184 |
| 21 | SEAL3_ | GCCCTATGTTAGTATC | human |
| | G2 | | XLOC_005184 |
| 22 | SEAL3_ | GTCAACCATTTGTAGG | human |
| | G3 | | XLOC_005184 |
| 23 | SEAL3_ | TATGTGGTAACAATCC | human |
| | G4 | | XLOC_005184 |
| 24 | SEAL3_ | GTGTCCCACCTATTAG | human |
| | G5 | | XLOC_005184 |
| 25 | SEAL3_ | CTTGCTCTAGTATGAC | human |
| | G6 | | XLOC_005184 |
| 26 | SEAL3_ | CCATGATAAGAGGGTC | human |
| | G7 | | XLOC_005184 |
| 27 | SEAL3_ | ACCTTATAGCACATGC | human |
| | G8 | | XLOC_005184 |
| 28 | SEAL4_ | GATTACCCACTTCAAG | human |
| | G1 | | ENSG00000203585/ |
| | | | SHARED_00113753 |
| 29 | SEAL4_ | GACACCTCAAGTTAGA | human |
| | G2 | | ENSG00000203585/ |
| | | | SHARED_00113753 |
| 30 | SEAL4_ | CAAGGGATGATAGCTC | human |
| | G3 | | ENSG00000203585/ |
| | | | SHARED_00113753 |
| 31 | SEAL4_ | AGGCATGGATTATACC | human |
| | G4 | | ENSG00000203585/ |
| | | | SHARED_00113753 |
| 32 | SEAL4_ | ACTAGGCTACATTACC | human |
| | G5 | | ENSG00000203585/ |
| | | | SHARED_00113753 |
| 33 | SEAL4_ | CCCTAGAATAAGTACC | human |
| | G6 | | ENSG00000203585/ |
| | | | SHARED_00113753 |
| 34 | SEAL4_ | GTCCCAATTTGAAGCC | human |
| | 753_G1 | | ENSG00000203585/ |
| | | | SHARED_00113753 |
| 35 | SEAL4_ | GGTAAGGAATACACTC | human |
| | 753_G2 | | ENSG00000203585/ |
| | | | SHARED_00113753 |
| 36 | SEAL4_ | TCCAAACTTAGTCAGC | human |
| | 753_G3 | | ENSG00000203585/ |
| | | | SHARED_00113753 |
| 37 | SEAL4_ | AACCATTAGAGTCCTC | human |
| | 753_G4 | | ENSG00000203585/ |
| | | | SHARED_00113753 |
| 38 | SEAL4_ | GCTGACCCATAATAGG | human |
| | 753_G5 | | ENSG00000203585/ |
| | | | SHARED_00113753 |
| 39 | SEAL4_ | GTAACCCATATCTGTG | human |
| | 753_G6 | | ENSG00000203585/ |
| | | | SHARED_00113753 |
| 40 | SEAL4_ | GTATCATTGTTCAGCC | human |
| | 753_G7 | | ENSG00000203585/ |
| | | | SHARED_00113753 |

Note:
ENSG00000203585 and SHARED_00113753 are two different transcripts transcribed from a genomic region within chr12: 67394371-67590771 (+).

[0115] In some instances, the ASO comprises any one of sequences set forth in Tables 3-9. In some instances, the ASO comprises at least 9 consecutive nucleotides with no more than 1 mismatch from sequences set forth in Tables 3-9. In some instances, the ASO comprises at least 9 consecutive nucleotides with no more than 2 mismatches from sequences set forth in Tables 3-9. In some instances, the ASO comprises at least 9 consecutive nucleotides with no more than 3 mismatches from sequences set forth in Tables 3-9. In some instances, the ASO comprises at least 10 consecutive nucleotides with no more than 1 mismatch from sequences set forth in Tables 3-9. In some instances, the ASO comprises at least 10 consecutive nucleotides with no more than 2 mismatches from sequences set forth in Tables 3-9. In some instances, the ASO comprises at least 10 consecutive nucleotides with no more than 3 mismatches from sequences set forth in Tables 3-9. In some instances, the ASO comprises at least 11 consecutive nucleotides with no more than 1 mismatch from sequences set forth in Tables 3-9. In some instances, the ASO comprises at least 11 consecutive nucleotides with no more than 2 mismatches from sequences set forth in Tables 3-9. In some instances, the ASO comprises at least 11 consecutive nucleotides with no more than 3 mismatches from sequences set forth in Tables 3-9. In some instances, the ASO comprises at least 12 consecutive nucleotides with no more than 1 mismatch from sequences set forth in Tables 3-9. In some instances, the ASO comprises at least 12 consecutive nucleotides with no more than 2 mismatches from sequences set forth in Tables 3-9. In some instances, the ASO comprises at least 12 consecutive nucleotides with no more than 3 mismatches from sequences set forth in Tables 3-9. In some instances, the ASO comprises at least 13 consecutive nucleotides with no more than 1 mismatch from sequences set forth in Tables 3-9. In some instances, the ASO comprises at least 13 consecutive nucleotides with no more than 2 mismatches from sequences set forth in Tables 3-9. In some instances, the ASO comprises at least 13 consecutive nucleotides with no more than 3 mismatches from sequences set forth in Tables 3-9. In some instances, the ASO comprises a nucleic acid sequence of 80%, at least 85%, at least 90%, at least 95% identical to sequences set forth in sequences set forth in Tables 3-9. Tables 3-9 show additional sequences of ASO candidates targeting lncRNAs disclosed herein and the criteria by which they were selected in silico. The ASO candidates were selected in silico based on the following criteria: 1) no off-target hybridization, 2) absence of questionable motifs, 3) target accessibility, 4) hybridization free energy, and 5) secondary structures.

TABLE 3
ASOs sequences targeting human
XLOC_055514 (Chr3)

| SEQ | |
|---|---|
| ID | |
| NO. | Sequence |
| 41 | TGTAGAGTGTGAGCCC |
| 42 | TTGTAGAGTGTGAGCC |
| 43 | GCTAGATCATGTTTGC |
| 44 | TAGATGTATCCTAGCT |
| 45 | TTAGATGTATCCTAGC |
| 46 | GTTAGATGTATCCTAG |
| 47 | GATGTTAGATGTATCC |
| 48 | GGGAATTGGGCTGTAT |
| 49 | GAATAGTTTGTCCCTC |
| 50 | TGGTGTTCAATAGGCT |
| 51 | ATGGTGTTCAATAGGC |
| 52 | GAAACCTCATCATCCG |
| 53 | ATCACCCGCTGATGGT |
| 54 | ATGAGCATCACCCGCT |
| 55 | ATCGGCTCTTATTAGC |
| 56 | GATCGGCTCTTATTAG |
| 57 | ACCACCAATCCCGATC |
| 58 | TACCACCAATCCCGAT |
| 59 | CTACCACCAATCCCGA |
| 60 | CCGCTCCACAAGACAC |
| 61 | ATCGGCTCTTATTAGC |
| 62 | GATCGGCTCTTATTAG |
| 63 | ACCACCAATCCCGATC |
| 64 | CCGCTCCACAAGACAC |
| 65 | ATCGGCTCTTATTAGC |
| 66 | GATCGGCTCTTATTAG |
| 67 | GAAGTTAGGCTCATGG |
| 68 | GTCACACGAATACCTG |
| 69 | AGTCACACGAATACCT |
| 70 | CAGTCACACGAATACC |
| 71 | GGTCTGGTTAGGAGTT |
| 72 | TGGTCTGGTTAGGAGT |
| 73 | TTATATCTGGAGACCC |
| 74 | GATAGTGTATGGCTTG |
| 75 | GGATGCTGCTTGTAATC |
| 76 | GATCATGTTTGCCTTGC |
| 77 | GATTGTTCTCACCAACC |
| 78 | TGTTAGATGTATCCTAG |
| 79 | TAGAATAGTTTGTCCCT |
| 80 | AGAAGCATCCTGACTGC |
| 81 | TTGTAGAGTGTGAGCCCT |
| 82 | AGATCATGTTTGCCTTGC |
| 83 | GACAGCTAGAGATAACTC |
| 84 | GAGATACAAGAGTTCTAC |
| 85 | TCATCAGAACCTCACTTG |
| 86 | ACTCTTCAAGCACTGGAC |
| 87 | TTGACAGTCCCACGCCCA |
| 88 | GCCCAGGAAAGAACTTCA |
| 89 | GACGTGATATGCCTGTAT |
| 90 | CATGATAGTGTATGGCTT |
| 91 | GATGCTGCTTGTAATCCAT |
| 92 | CTGGATGCTGCTTGTAATC |
| 93 | GGGTCTGTCTTCTGCTGGA |
| 94 | TTTGTAGAGTGTGAGCCCT |
| 95 | GAATTACTGCAAATCAGCC |
| 96 | GATTGTTCTCACCAACCCG |
| 97 | ACTGAATCTGCGTTGTTGG |
| 98 | GAACTGAATCTGCGTTGTT |
| 99 | TCATGGGAATTGGGCTGTA |
| 100 | GCACAGATACTCTTCAAGC |
| 101 | TCTTAACCCAGAACCCTTA |
| 102 | TGGAAATCTACCACCAATC |
| 103 | GACGTGATATGCCTGTATC |
| 104 | TGATAGTGTATGGCTTGGT |
| 105 | GATGCTGCTTGTAATCCATT |
| 106 | TGTAGAGTGTGAGCCCTGGT |
| 107 | ATGTTTGCCTTGCTTAGAGA |
| 108 | ATCTGCGTTGTTGGGAAGCC |
| 109 | GATACAAGAGTTCTACTTAG |
| 110 | TGCACAGATACTCTTCAAGC |
| 111 | CCTTCCAGTTCCTGCACAAA |

TABLE 4
ASO sequences targeting human
XLOC_069921 (Chr6)

| SEQ | |
|---|---|
| ID | |
| NO. | Sequence |
| 112 | GATGTGCTTATACTGC |
| 113 | GGCACTCAACTCTATG |
| 114 | ACCAGTCTATTGTAAC |
| 115 | GCATAACCAGTCTATT |
| 116 | GGCATAACCAGTCTAT |
| 117 | CTTAATTGCCAACTAG |
| 118 | GTGCCTTGTGACTAGT |
| 119 | GATTAACACCAATTGC |
| 120 | ACCCTATGCTACTGTA |
| 121 | TAACCCTATGCTACTG |
| 122 | GTTTAACCCTATGCTA |
| 123 | AGTTTAACCCTATGCT |
| 124 | CAGTTTAACCCTATGC |
| 125 | ACAGTTTAACCCTATG |
| 126 | CCCATTAGCCTATATG |
| 127 | GCACCAGTATGACATT |
| 128 | ATGTTGAGCCATGCCC |
| 129 | GATGTTGAGCCATGCC |
| 130 | CACCAGATGTTGAGCC |
| 131 | GGCTTGATGTGTCCTC |
| 132 | GTGGCTTGATGTGTCC |
| 133 | GAGCCTAATGTATGCC |
| 134 | GTTACTAAGCCAATCT |
| 135 | TAGTCCTCCTAGCAGC |
| 136 | ATGTTAGTCCTCCTAG |
| 137 | GTACCATATGTTAGTC |
| 138 | GAGTACCATATGTTAG |
| 139 | AACAGTCAGAGTATCC |
| 140 | TAACTATGAGGTCACC |
| 141 | TATAATGCTAGATCCC |
| 142 | GTATAATGCTAGATCC |
| 143 | TCATTGTTAGGACCAC |
| 144 | AGGTCACTCTAGTAAC |
| 145 | TAGGTCACTCTAGTAA |
| 146 | ATAGGTCACTCTAGTA |
| 147 | AATAGGTCACTCTAGT |
| 148 | GGGAAATAGGTCACTC |
| 149 | ATGTCCAATCCTACAC |
| 150 | GCCATGTCCAATCCTA |
| 151 | GGTTTAGTAGGGATAT |
| 152 | TTAGGGTTTAGTAGGG |
| 153 | GTCTTTGACCAGTGTA |
| 154 | GGGTTGCATGAGGTGT |
| 155 | CAATTCACTGGTTGGA |
| 156 | GATCTAACTATCCACC |
| 157 | TAGACTGCAACTAAGT |
| 158 | GTGTGGCTCATTAGGC |
| 159 | TACATCTCATAGTACC |
| 160 | CTACATCTCATAGTAC |
| 161 | CCTACATCTCATAGTA |
| 162 | GTGTGGAACTTATCAA |
| 163 | CTGTGTGGAACTTATC |
| 164 | GATATGCACCATCCAT |
| 165 | ATGATATGCACCATCC |
| 166 | GCCAGCCTTAGTTTAA |
| 167 | ATTAGAGTTGGCATAC |
| 168 | GTCTAAGTTGCAGGAG |
| 169 | TAGTCTAAGTTGCAGG |
| 170 | ATGAGTACCAGCAACC |
| 171 | GATGGCAATGAGTACC |
| 172 | ATAGGACATCAGTTGC |
| 173 | GCATCAATTAGATCTC |
| 174 | GGCATCAATTAGATCT |
| 175 | ACCAAATGATGTGCTTA |
| 176 | CACCAAATGATGTGCTT |
| 177 | ACACCAAATGATGTGCT |
| 178 | GACACCAAATGATGTGC |
| 179 | TGACACCAAATGATGTG |
| 180 | ACTCAACTCTATGACAC |
| 181 | CACTCAACTCTATGACA |
| 182 | GCACTCAACTCTATGAC |
| 183 | GGCACTCAACTCTATGA |
| 184 | CAGAAGCAACTAATTTC |
| 185 | CCAGAAGCAACTAATTT |
| 186 | CCCAGAAGCAACTAATT |
| 187 | GCCTCACTGTTACTAAA |
| 188 | CTTGTGGTGGGATGGTG |
| 189 | TCTTGTGGTGGGATGGT |
| 190 | TTCTTGTGGTGGGATGG |
| 191 | TACTCACACTATATTGC |
| 192 | GACCTTAGAGAATACTC |
| 193 | TGACCTTAGAGAATACT |
| 194 | TTGACCTTAGAGAATAC |
| 195 | AGCATATCTTACTGTTC |
| 196 | CCACTTTAAGTAAGCAT |
| 197 | TCCACTTTAAGTAAGCA |
| 198 | GCCTATATGATTATCAG |
| 199 | CCATTAGCCTATATGAT |
| 200 | CCCATTAGCCTATATGA |
| 201 | TCCCATTAGCCTATATG |
| 202 | CTCACCACAGTATAGTA |
| 203 | TCTCACCACAGTATAGT |
| 204 | ATCTCACCACAGTATAG |
| 205 | CATCTCACCACAGTATA |
| 206 | TCATCTCACCACAGTAT |
| 207 | GTCATCTCACCACAGTA |
| 208 | TAGAGAAGCACCAAACT |
| 209 | TTAGAGAAGCACCAAAC |
| 210 | GGGTGTTGTAATTTGTA |
| 211 | CAGGAACTTAACAAAGT |
| 212 | ACCAGATGTTGAGCCAT |
| 213 | CACCAGATGTTGAGCCA |
| 214 | GTTAGGACCACAGATAG |
| 215 | GCATATCTGTACCATAC |
| 216 | AAACTTGTTCTGTGCCA |
| 217 | AGAACAATTCACTGGTT |
| 218 | CATCAGATCATGGCAAA |
| 219 | CCCTACATCTCATAGTA |
| 220 | GTCAGCATCTAGCAAAT |
| 221 | CTATTAGTCTAAGTTGC |
| 222 | CACTAACAAGGCTGTTC |
| 223 | GACACCAAATGATGTGCT |
| 224 | TGGCACTCAACTCTATGA |
| 225 | CATCCATAGGAGATTGAT |
| 226 | TGTATAATGCTAGATCCC |
| 227 | TGTGTGAACAATGTGGTG |
| 228 | CAAACCTTACCTATAGTG |
| 229 | GTGAACTTTAGACCAATG |
| 230 | ATCTCGATCTCTATAGCA |
| 231 | AACACGGCTTCTCACCAG |
| 232 | CACTAACAAGGCTGTTCA |
| 233 | ATGACACCAAATGATGTGC |
| 234 | CCAGAAGCAACTAATTTCA |
| 235 | GCATAACCAGTCTATTGTA |
| 236 | CTACAGAAGGATGCAAATC |
| 237 | CACTTAATTGCCAACTAGA |
| 238 | CATTCTATTTGCTGTGACA |
| 239 | GGTTGTTTGTGCTGGTCTC |
| 240 | ACAGTTTAACCCTATGCTA |
| 241 | TGATCTGCAACCACAAGTA |
| 242 | GTAGTAGGTGTAGATATGC |
| 243 | CAGGCATCAATTAGATCTC |
| 244 | CACTTAATTGCCAACTAGAA |
| 245 | GTTTAACCCTATGCTACTGT |
| 246 | ATTGCATATCTGTACCATAC |
| 247 | AGTGCTACAAACTATTCAGT |
| 248 | TGCAAGCATTTATTCTAGTG |
| 249 | CCTGACCTACATTTGCAACT |
| 250 | GCCTGACCTACATTTGCAAC |
| 251 | TGGTATAACAAATTAGGGCC |
| 252 | ATGGTATAACAAATTAGGGC |
| 253 | GATATGCACCATCCATCAAT |
| 254 | TGATATGCACCATCCATCAA |
| 255 | ATTGCCAGCCTTAGTTTAAA |
| 256 | CATTGCCAGCCTTAGTTTAA |
| 257 | TCATTGCCAGCCTTAGTTTA |
| 258 | AACTGCTGGAAACCTCACTT |
| 259 | GAACTGCTGGAAACCTCACT |
| 260 | TTAGTCTAAGTTGCAGGAGT |
| 261 | ATTAGTCTAAGTTGCAGGAG |
| 262 | TATTAGTCTAAGTTGCAGGA |
| 263 | CTATTAGTCTAAGTTGCAGG |
| 264 | TTGATGGCAATGAGTACCAG |
| 265 | GTTGATGGCAATGAGTACCA |
| 266 | AGTTGATGGCAATGAGTACC |
| 267 | AAGTTGATGGCAATGAGTAC |
| 268 | ACATCAGTTGCAGAAGGACT |
| 269 | CCAGGCATCAATTAGATCTC |
| 270 | CCACTAACAAGGCTGTTCAG |
| 271 | ACCACTAACAAGGCTGTTCA |
| 272 | AACCACTAACAAGGCTGTTC |
| 273 | AAACCACTAACAAGGCTGTT |
| 274 | TAAACCACTAACAAGGCTGT |

TABLE 5
ASO sequences targeting human
XLOC_005184 (Chr1)

| SEQ | |
|---|---|
| ID | |
| NO. | Sequence |
| 275 | GGTCTCACTAAAGGGT |
| 276 | CGATCTTCAAAGGGAC |
| 277 | GCGATCTTCAAAGGGA |
| 278 | AGGCGATCTTCAAAGG |
| 279 | TAGTGAGGCGATCTTC |
| 280 | CTAGTGAGGCGATCTT |
| 281 | TCTAGTGAGGCGATCT |
| 282 | ATCAACTAAAGCACCC |
| 283 | GCCCTATGTTAGTATC |
| 284 | TGCCCTATGTTAGTAT |
| 285 | TTGCCCTATGTTAGTA |
| 286 | GTTTGCCCTATGTTAG |
| 287 | CTTTAAGGCGTGATTT |
| 288 | TTCTTACAGAGCAACG |
| 289 | GCAGGATGAGTAGTTC |
| 290 | ACAATAGGTGGTATAC |
| 291 | GTTACAATAGGTGGTA |
| 292 | GGTTACAATAGGTGGT |
| 293 | AGCTCTGTATCGCAAA |
| 294 | AAGCTCTGTATCGCAA |
| 295 | CAAGCTCTGTATCGCA |
| 296 | TCAAGCTCTGTATCGC |
| 297 | ATCAAGCTCTGTATCG |
| 298 | GTAATGAGAGTTATCC |
| 299 | ATGATCCTCCTATGAC |
| 300 | GGCTATGATCCTCCTA |
| 301 | TTGTAGGAGCAGCATA |
| 302 | GTCAACCATTTGTAGG |
| 303 | CAATCCTACCTATTGA |
| 304 | TATGTGGTAACAATCC |
| 305 | GTATGTGGTAACAATC |
| 306 | GTGTATTGGGAGTATG |
| 307 | GTCCATCCAAGTCATG |
| 308 | AATCTTGAGCTACTAC |
| 309 | GTGAGGTTCCGATAAA |
| 310 | GGTGAGGTTCCGATAA |
| 311 | TGGTGAGGTTCCGATA |
| 312 | GGTTGGTGAGGTTCCG |
| 313 | GGGTTGGTGAGGTTCC |
| 314 | CACCCGAAGTTTGCAA |
| 315 | TCACCCGAAGTTTGCA |
| 316 | TTCACCCGAAGTTTGC |
| 317 | TTTCACCCGAAGTTTG |
| 318 | TACATTTCACCCGAAG |
| 319 | GCTAATACTAATGTCC |
| 320 | GGCTAATACTAATGTC |
| 321 | CATAGGTGGTTTCCGG |
| 322 | TCATAGGTGGTTTCCG |
| 323 | ACCTCAGTACCTGCGT |
| 324 | AACCTCAGTACCTGCG |
| 325 | GTGTCCCACCTATTAG |
| 326 | ATAGTAGGTTCTAGGG |
| 327 | GATAGTAGGTTCTAGG |
| 328 | GGATAGTAGGTTCTAG |
| 329 | TGGATAGTAGGTTCTA |
| 330 | GTGGATAGTAGGTTCT |
| 331 | AGTGGATAGTAGGTTC |
| 332 | TAGTGGATAGTAGGTT |
| 333 | GCATGGTATAGTGGAT |
| 334 | CGAACACACTCTTCTA |
| 335 | GCCAAACCCGCACATG |
| 336 | ATGCCAAACCCGCACA |
| 337 | TATGCCAAACCCGCAC |
| 338 | CATATGCCAAACCCGC |
| 339 | CCATATGCCAAACCCG |
| 340 | ACGTCTATCAATGGTA |
| 341 | GCTAGGGCTGATTCAT |
| 342 | GACTATGAGTAATTCC |
| 343 | CACGATACATAGCAAT |
| 344 | GTCAGTTAGAAGTCAC |
| 345 | GTATGACCTGGACCCA |
| 346 | AGTATGACCTGGACCC |
| 347 | TAGTATGACCTGGACC |
| 348 | CTCTAGTATGACCTGG |
| 349 | GCTCTAGTATGACCTG |
| 350 | TTGCTCTAGTATGACC |
| 351 | CTTGCTCTAGTATGAC |
| 352 | CGTGACCACCAGAGAT |
| 353 | CCGTGACCACCAGAGA |
| 354 | ACCGTGACCACCAGAG |
| 355 | AACCGTGACCACCAGA |
| 356 | CAACCGTGACCACCAG |
| 357 | AACAACCGTGACCACC |
| 358 | CAACAACCGTGACCAC |
| 359 | CCAACAACCGTGACCA |
| 360 | CCCAACAACCGTGACC |
| 361 | TCCCAACAACCGTGAC |
| 362 | GACTCCCAACAACCGT |
| 363 | TGACTCCCAACAACCG |
| 364 | GCCAACTGCCACTAGT |
| 365 | GTGGACTAAGATTGCT |
| 366 | TGTGGACTAAGATTGC |
| 367 | GTTATCTGAGGGAATC |
| 368 | GTACTTGTGTTGGTCA |
| 369 | AGTGTACTTGTGTTGG |
| 370 | CGACCTCACAGCAAGG |
| 371 | CCGACCTCACAGCAAG |
| 372 | TACACCGACCTCACAG |
| 373 | ATACACCGACCTCACA |
| 374 | AATACACCGACCTCAC |
| 375 | TCAATACACCGACCTC |
| 376 | ATCAATACACCGACCT |
| 377 | GATCAATACACCGACC |
| 378 | GTATGAAGTCTGCCCA |
| 379 | AGTATGAAGTCTGCCC |
| 380 | TGTCTTTCGGAGCTAC |
| 381 | CTGTCTTTCGGAGCTA |
| 382 | ACTAGGAGGTAATCTG |
| 383 | TAACTAGGAGGTAATC |
| 384 | CGTTACCTCCTAGTAA |
| 385 | GTCCGTCTATAATCAT |
| 386 | TATGAGTCGGGAATCA |
| 387 | GTATGAGTCGGGAATC |
| 388 | TGTATGAGTCGGGAAT |
| 389 | AATCTGTATGAGTCGG |
| 390 | TGCTAGGTGAGTATCA |
| 391 | CTGCTAGGTGAGTATC |
| 392 | GGTCCCAGGTAAGTTA |
| 393 | GGTTCCTGTAGTTGAT |
| 394 | GACTGGAATATAGCCG |
| 395 | TGCTATTTGGACTGTC |
| 396 | ACCCTATTGTCATGGT |
| 397 | TACCCTATTGTCATGG |
| 398 | CATGATAAGAGGGTCC |
| 399 | CCATGATAAGAGGGTC |
| 400 | GTACTGGAATGAGTCT |
| 401 | CGTTCTGATTGGTGTT |
| 402 | CAATAGCCGTTCTGAT |
| 403 | TCAATAGCCGTTCTGA |
| 404 | ATCAATAGCCGTTCTG |
| 405 | TATCAATAGCCGTTCT |
| 406 | ATATCAATAGCCGTTC |
| 407 | CATATCAATAGCCGTT |
| 408 | CCATATCAATAGCCGT |
| 409 | ACCATATCAATAGCCG |
| 410 | CTTGAGGTATTAGACC |
| 411 | ACCGAACCACTCCATC |
| 412 | AACCGAACCACTCCAT |
| 413 | CAACCGAACCACTCCA |
| 414 | GCAACCGAACCACTCC |
| 415 | TGCAACCGAACCACTC |
| 416 | TATCTTGCGGTGTGTG |
| 417 | GTATCTTGCGGTGTGT |
| 418 | TGTATCTTGCGGTGTG |
| 419 | GTGCTCCAATGATATC |
| 420 | TTGCGGTCACACATTT |
| 421 | ATTGCGGTCACACATT |
| 422 | TATTGCGGTCACACAT |
| 423 | CTATTGCGGTCACACA |
| 424 | ACCTTATAGCACATGC |
| 425 | TATCACACTACTTCGA |
| 426 | TAATAAAGCACGGTCT |
| 427 | TTAATAAAGCACGGTC |
| 428 | CATTAATAAAGCACGG |
| 429 | GGTTCATACGCATTTA |
| 430 | AGGTTCATACGCATTT |
| 431 | TAGGTTCATACGCATT |
| 432 | TTAGGTTCATACGCAT |
| 433 | GTTAGGTTCATACGCA |
| 434 | TGTTAGGTTCATACGC |
| 435 | TTGTTAGGTTCATACG |
| 436 | GGCAATCTTGGTGTAC |
| 437 | TGGCAATCTTGGTGTA |
| 438 | TCAGTACGATCAGAGA |
| 439 | TTCAGTACGATCAGAG |
| 440 | TTTCAGTACGATCAGA |
| 441 | ATTTCAGTACGATCAG |
| 442 | CAATTTCAGTACGATC |
| 443 | GATCAATTTCAGTACG |
| 444 | AAGAAACTCACAATGCC |
| 445 | GAAGAAACTCACAATGC |
| 446 | TGCGTGGAGACCAGATG |
| 447 | CCATATGCAAACTATAG |
| 448 | CACCATATGCAAACTAT |
| 449 | AAACACTGTTCTATCCC |
| 450 | TAAACACTGTTCTATCC |
| 451 | GTAAACACTGTTCTATC |
| 452 | CAAGTAAACACTGTTCT |
| 453 | CCAAGTAAACACTGTTC |
| 454 | GCCAAGTAAACACTGTT |
| 455 | AGCCAAGTAAACACTGT |
| 456 | CAGCCAAGTAAACACTG |
| 457 | ACAGCCAAGTAAACACT |
| 458 | CACAGCCAAGTAAACAC |
| 459 | GCATAAAGCTACACAGC |
| 460 | TTGGGACACAAGGCATA |
| 461 | GCCAATTTAACCATCCA |
| 462 | ATGCCAATTTAACCATC |
| 463 | GATGCCAATTTAACCAT |
| 464 | CGATGCCAATTTAACCA |
| 465 | TCGATGCCAATTTAACC |
| 466 | AGTCGATGCCAATTTAA |
| 467 | AAGTCGATGCCAATTTA |
| 468 | AAAGTCGATGCCAATTT |
| 469 | TAAAGTCGATGCCAATT |
| 470 | TTAAAGTCGATGCCAAT |
| 471 | GTTAAAGTCGATGCCAA |
| 472 | CCTTGATGATCTGTTAG |
| 473 | GCCTTGATGATCTGTTA |
| 474 | AGCCTTGATGATCTGTT |
| 475 | AAGTCAGCCTTGATGAT |
| 476 | AAAGTCAGCCTTGATGA |
| 477 | GAAAGTCAGCCTTGATG |
| 478 | AGAAAGTCAGCCTTGAT |
| 479 | GAGAAAGTCAGCCTTGA |
| 480 | AGAGAAAGTCAGCCTTG |
| 481 | CAAGAGAAAGTCAGCCT |
| 482 | CCAAGAGAAAGTCAGCC |
| 483 | CCCAAGAGAAAGTCAGC |
| 484 | CTGCAAGTGAGAGATGC |
| 485 | TCTGCAAGTGAGAGATG |
| 486 | GTGTTCTCTGCAAGTGA |
| 487 | TGTGTTCTCTGCAAGTG |
| 488 | ATGTGTTCTCTGCAAGT |
| 489 | ACATTGCTATTAGAGTC |
| 490 | GACATTGCTATTAGAGT |
| 491 | TGACATTGCTATTAGAG |
| 492 | GTGACATTGCTATTAGA |
| 493 | TGTGACATTGCTATTAG |
| 494 | GTAAATACTCCAGGTTT |
| 495 | TGTAAATACTCCAGGTT |
| 496 | ATGTAAATACTCCAGGT |
| 497 | AATGTAAATACTCCAGG |
| 498 | TCAGTGGCAGATATTAC |
| 499 | TTCAGTGGCAGATATTA |
| 500 | GTTCAGTGGCAGATATT |
| 501 | AGTTCAGTGGCAGATAT |
| 502 | CAGTTCAGTGGCAGATA |
| 503 | GCAGTTCAGTGGCAGAT |
| 504 | ATTTGCAGTTCAGTGGC |
| 505 | AATTTGCAGTTCAGTGG |
| 506 | CAATTTGCAGTTCAGTG |
| 507 | ACAATTTGCAGTTCAGT |
| 508 | AACAATTTGCAGTTCAG |
| 509 | GGTGAGGTTCCGATAAA |
| 510 | CCCAAGTTTGCCTGTGA |
| 511 | ACTAACACTGCCATCCC |
| 512 | TACTAACACTGCCATCC |
| 513 | ATACTAACACTGCCATC |
| 514 | AATACTAACACTGCCAT |
| 515 | GAATACTAACACTGCCA |
| 516 | AGAATACTAACACTGCC |
| 517 | GAAACTTGAATTGGTTC |
| 518 | GGAAACTTGAATTGGTT |
| 519 | GGGAAACTTGAATTGGT |
| 520 | TACAAAGATTGGGCATG |
| 521 | TTACAAAGATTGGGCAT |
| 522 | CTTACAAAGATTGGGCA |
| 523 | TCTTACAAAGATTGGGC |
| 524 | CTCTTACAAAGATTGGG |
| 525 | ACTCTTACAAAGATTGG |
| 526 | ATGGAAATGACTGTGTA |
| 527 | CTATGGAAATGACTGTG |
| 528 | ACCGAACCACTCCATCT |
| 529 | AACCGAACCACTCCATC |
| 530 | CAACCGAACCACTCCAT |
| 531 | GCAACCGAACCACTCCA |
| 532 | TGCAACCGAACCACTCC |
| 533 | CTGCAACCGAACCACTC |
| 534 | CCTGCAACCGAACCACT |
| 535 | CCCTGCAACCGAACCAC |
| 536 | CATTGTCTGCTCCAGGA |
| 537 | CCATTGTCTGCTCCAGG |
| 538 | GTAATCCCATTGTCTGC |
| 539 | AGTAATCCCATTGTCTG |
| 540 | CAGTAATCCCATTGTCT |
| 541 | CCAGTAATCCCATTGTC |
| 542 | TCAGCCTTTACTCCAAA |
| | G |
| 543 | ATCAGCCTTTACTCCAA |
| | A |
| 544 | GATCAGCCTTTACTCCA |
| | A |
| 545 | GGGCACTCTCACATTGG |
| | G |
| 546 | AGGGCACTCTCACATTG |
| | G |
| 547 | CTGCAAGTGAGAGATGC |
| | C |
| 548 | TCTGCAAGTGAGAGATG |
| | C |
| 549 | TGTGTTCTCTGCAAGTG |
| | A |
| 550 | ATGTGTTCTCTGCAAGT |
| | G |
| 551 | TATGTGTTCTCTGCAAGT |
| 552 | GTATGTGTTCTCTGCAA |
| | G |
| 553 | TGTATGTGTTCTCTGCAA |
| 554 | ATGTATGTGTTCTCTGCA |
| 555 | AATGTATGTGTTCTCTGC |
| 556 | GCGATCTTCAAAGGGAC |
| | C |
| 557 | TCTAGTGAGGCGATCTTC |
| 558 | TCAGCCAGATGAAAGATT |
| 559 | ATCCTTCAGCCAGATGAA |
| 560 | AGTCCAAGTCTCTTAGAT |
| 561 | TAGTCCAAGTCTCTTAGA |
| 562 | CTAGTCCAAGTCTCTTAG |
| 563 | TGATCCTGAGAAACTAGT |
| 564 | ATGATCCTGAGAAACTAG |
| 565 | TGCCCAAATCTATATGCT |
| 566 | GTGCCCAAATCTATATGC |
| 567 | AGTGCCCAAATCTATATG |
| 568 | GAGTGCCCAAATCTATAT |
| 569 | AGAGTGCCCAAATCTATA |
| 570 | CAGAGTGCCCAAATCTAT |
| 571 | ACAGAGTGCCCAAATCTA |
| 572 | GACAGAGTGCCCAAATCT |
| 573 | CTTAATCACAAGCACACA |
| 574 | ACTTAATCACAAGCACAC |
| 575 | GAACTTAATCACAAGCAC |
| 576 | CAGAACTTAATCACAAGC |
| 577 | GGTCAGAACTTAATCACA |
| 578 | TGGTCAGAACTTAATCAC |
| 579 | CTTGGTCAGAACTTAATC |
| 580 | CCTTGGTCAGAACTTAAT |
| 581 | GCTTCCAAGTTCATCAGC |
| 582 | GGCTTCCAAGTTCATCAG |
| 583 | AGGCTTCCAAGTTCATCA |
| 584 | AAGGCTTCCAAGTTCATC |
| 585 | AAAGGCTTCCAAGTTCAT |
| 586 | CAAAGGCTTCCAAGTTCA |
| 587 | TCAAAGGCTTCCAAGTTC |
| 588 | TTCAAAGGCTTCCAAGTT |
| 589 | GCACATAGCTTCAAAGGC |
| 590 | GGCACATAGCTTCAAAGG |
| 591 | ACATATTGATTCTGGGCC |
| 592 | CACATATTGATTCTGGGC |
| 593 | TCCACATATTGATTCTGG |
| 594 | AATTAATGACAGGCTCCC |
| 595 | TAATTAATGACAGGCTCC |
| 596 | CTAATTAATGACAGGCTC |
| 597 | CCTAATTAATGACAGGCT |
| 598 | TGCCTAATTAATGACAGG |
| 599 | GACAGTTCTTACATTAGC |
| 600 | CGTCTAAAGCAGCCTTGC |
| 601 | CCGTCTAAAGCAGCCTTG |
| 602 | TCCGTCTAAAGCAGCCTT |
| 603 | TTCCGTCTAAAGCAGCCT |
| 604 | ATTCCGTCTAAAGCAGCC |
| 605 | AATTCCGTCTAAAGCAGC |
| 606 | GTATTGGGAGTATGTGGT |
| 607 | TGTATTGGGAGTATGTGG |
| 608 | GTGTATTGGGAGTATGTG |
| 609 | AGTGTATTGGGAGTATGT |
| 610 | CTGTGAAAGTGTATTGGG |
| 611 | TCTGTGAAAGTGTATTGG |
| 612 | ATGGTGAAATGGGTATTC |
| 613 | CATGGTGAAATGGGTATT |
| 614 | TGTTAATGAAGGCATGGT |
| 615 | GGAAACCCTATTCTTTGA |
| 616 | GCATGACAACTATTTCCA |
| 617 | AGCATGACAACTATTTCC |
| 618 | AGTTTGCCTGTGAAATTC |
| 619 | CAAGTTTGCCTGTGAAAT |
| 620 | CCAAGTTTGCCTGTGAAA |
| 621 | CTTCCAAAGACTTCGTAT |
| 622 | ACTTCCAAAGACTTCGTA |
| 623 | ATCCAGCCAAACACTCCC |
| 624 | CATCCAGCCAAACACTCC |
| 625 | ACATCCAGCCAAACACTC |
| 626 | AACATCCAGCCAAACACT |
| 627 | CACATTCATAGAGCCCACA |
| 628 | GCACATTCATAGAGCCCAC |
| 629 | AGCACATTCATAGAGCCCA |
| 630 | CAACTAAAGCACCCATATA |
| 631 | TCAACTAAAGCACCCATAT |
| 632 | ATCAACTAAAGCACCCATA |
| 633 | ACTTCCACAAGATAACCCT |
| 634 | CACTTCCACAAGATAACCC |
| 635 | CCACTTCCACAAGATAACC |
| 636 | CCCACTTCCACAAGATAAC |
| 637 | TCCCACTTCCACAAGATAA |
| 638 | ATCCCACTTCCACAAGATA |
| 639 | CATCCCACTTCCACAAGAT |
| 640 | AGAATAAGCTCTCAACTGT |
| 641 | GTTACAGGAGAATAAGCTC |
| 642 | TTCAAGGATGGTTACAGGA |
| 643 | ATTCAAGGATGGTTACAGG |
| 644 | TCTCCACTCACCATGAACA |
| 645 | ACTCTCCACTCACCATGAA |
| 646 | AACTCTCCACTCACCATGA |
| 647 | AAACTCTCCACTCACCATG |
| 648 | ACATACATTTCACCCGAAG |
| 649 | TACATACATTTCACCCGAA |
| 650 | CTACATACATTTCACCCGA |
| 651 | GAGCCCATCACAGCGAAAG |
| 652 | ATCATATAAGAACTACCGG |
| 653 | CCGTAAGACAGCTCTTCCT |
| 654 | TCCGTAAGACAGCTCTTCC |
| 655 | GGTCCCAGGTAAGTTAATT |
| 656 | TTGATCTCATTCGGAAGGA |
| 657 | CTTGATCTCATTCGGAAGG |
| 658 | TGCAGCCTAAGTTTATTAG |
| 659 | CATATGTTAAGGATGACTG |
| 660 | TATCAATCAGTGTGGAGCT |
| | T |
| 661 | GTATCAATCAGTGTGGAGC |
| | T |
| 662 | AGTATCAATCAGTGTGGAG |
| | C |
| 663 | GAGTATCAATCAGTGTGGA |
| | G |
| 664 | AGAGTATCAATCAGTGTGG |
| | A |
| 665 | CATCCCACTTCCACAAGAT |
| | A |
| 666 | TCATCCCACTTCCACAAGA |
| | T |
| 667 | CACACCCTTGGTCAGAACT |
| | T |
| 668 | ACACACCCTTGGTCAGAAC |
| | T |
| 669 | CACACACCCTTGGTCAGAA |
| | C |
| 670 | TCACACACCCTTGGTCAGA |
| | A |
| 671 | GTCACACACCCTTGGTCAG |
| | A |
| 672 | CGTCACACACCCTTGGTCA |
| | G |
| 673 | ACGTCACACACCCTTGGTC |
| | A |
| 674 | CACGTCACACACCCTTGGT |
| | C |
| 675 | CCACGTCACACACCCTTGG |
| | T |
| 676 | CCCACGTCACACACCCTTG |
| | G |
| 677 | GCCCACGTCACACACCCTT |
| | G |
| 678 | ATCAAGCTCTGTATCGCAA |
| | A |
| 679 | CATCAAGCTCTGTATCGCA |
| | A |
| 680 | CCATCAAGCTCTGTATCGC |
| | A |
| 681 | TTGTAGGAGCAGCATAGGC |
| | A |
| 682 | TTTGTAGGAGCAGCATAGG |
| | C |
| 683 | CTGACTAACATTTGGGCTA |
| | G |
| 684 | GAACATGAGTCTAAATGAA |
| | C |
| 685 | CTGAACATGAGTCTAAATG |
| | A |
| 686 | CCTAGTGGCTCAATCAGTT |
| | A |
| 687 | ACCTAGTGGCTCAATCAGT |
| | T |
| 688 | TACCTAGTGGCTCAATCAG |
| | T |
| 689 | ATACCTAGTGGCTCAATCA |
| | G |
| 690 | AAACGCAACTGAACTGGAT |
| | C |
| 691 | AGAGATCAGTCACCCAACA |
| | G |
| 692 | CCTGCAAGCCTAAGATGAA |
| | A |
| 693 | GATCAGCATAACTAGAGAT |
| | T |
| 694 | ATAGTCAATCAGTGCCCTA |
| | A |

TABLE 6
ASO sequences targeting human
ENSG00000203585/SHARED_00113753
(Chr12)

| SEQ | |
|---|---|
| ID | |
| NO. | Sequence |
| 695 | GGACCTAGCCAATAAG |
| 696 | TAGCATAATCTGGCAC |
| 697 | TCCTAGCATAATCTGG |
| 698 | ACATCCTAGCATAATC |
| 699 | ACGCCAGCTCTCAACT |
| 700 | GACGCCAGCTCTCAAC |
| 701 | TGACGCCAGCTCTCAA |
| 702 | ATGACGCCAGCTCTCA |
| 703 | AATGACGCCAGCTCTC |
| 704 | TAATGACGCCAGCTCT |
| 705 | CTAATGACGCCAGCTC |
| 706 | TCTAATGACGCCAGCT |
| 707 | TTCTAATGACGCCAGC |
| 708 | GTTCTAATGACGCCAG |
| 709 | TGTTCTAATGACGCCA |
| 710 | CTGTTCTAATGACGCC |
| 711 | CCTGTTCTAATGACGC |
| 712 | GCCTGTTCTAATGACG |
| 713 | CTGCCGAGACATGCCT |
| 714 | TCCTGCCGAGACATGC |
| 715 | TTCCTGCCGAGACATG |
| 716 | CTTCCTGCCGAGACAT |
| 717 | ACCTTCCTGCCGAGAC |
| 718 | GACCTTCCTGCCGAGA |
| 719 | CACATAGCCTCAGCGA |
| 720 | TCACATAGCCTCAGCG |
| 721 | GTCCCAATTTGAAGCC |
| 722 | CAAACGGTGAGTTTCA |
| 723 | CCAAACGGTGAGTTTC |
| 724 | GATTAGTATGCCAGGG |
| 725 | TGATTAGTATGCCAGG |
| 726 | GATCATTGCATAGAGC |
| 727 | GTAGATCATTGCATAG |
| 728 | CGCTCAAATAATGTGC |
| 729 | ACGCTCAAATAATGTG |
| 730 | CACTAACGCTCAAATA |
| 731 | TCACTAACGCTCAAAT |
| 732 | ATCACTAACGCTCAAA |
| 733 | TATCACTAACGCTCAA |
| 734 | TTATCACTAACGCTCA |
| 735 | ACTTATCACTAACGCT |
| 736 | CACTTATCACTAACGC |
| 737 | CCCATAGACATAGGTC |
| 738 | ACCCATAGACATAGGT |
| 739 | GCTATAACTGATTCCC |
| 740 | CGTAACAGCTCAGACA |
| 741 | CCGTAACAGCTCAGAC |
| 742 | TATATATCTAGGACCC |
| 743 | CTATATATCTAGGACC |
| 744 | CCTAACGACTAAAGAA |
| 745 | CTCCTAACGACTAAAG |
| 746 | CCTCCTAACGACTAAA |
| 747 | GCCTCCTAACGACTAA |
| 748 | TGCCTCCTAACGACTA |
| 749 | ATGCCTCCTAACGACT |
| 750 | AATGCCTCCTAACGAC |
| 751 | AAATGCCTCCTAACGA |
| 752 | CAAATGCCTCCTAACG |
| 753 | GTTCTATCAGGCTCAC |
| 754 | TAGTTCTATCAGGCTC |
| 755 | GGTAAGGAATACACTC |
| 756 | AACATCGCAGTTGTTC |
| 757 | TAACATCGCAGTTGTT |
| 758 | GATAACATCGCAGTTG |
| 759 | GGATAACATCGCAGTT |
| 760 | AGGATAACATCGCAGT |
| 761 | TAGAGGATAACATCGC |
| 762 | TTAGAGGATAACATCG |
| 763 | AGCCAGGACTCTACGG |
| 764 | CAGCCAGGACTCTACG |
| 765 | AAACCACGCACCAGCC |
| 766 | CGATTCCACTTCAGCA |
| 767 | TTAACCACGATTCCAC |
| 768 | GTTAACCACGATTCCA |
| 769 | TGTTAACCACGATTCC |
| 770 | GCCTGTTAACCACGAT |
| 771 | CCGTGGTAATTTGAAA |
| 772 | CGTAAGAAAGCACTAT |
| 773 | CGTGTGTATCTCCTAG |
| 774 | GCGTGTGTATCTCCTA |
| 775 | CGCAACTTCAATATCC |
| 776 | ACGCAACTTCAATATC |
| 777 | CACGCAACTTCAATAT |
| 778 | CCACGCAACTTCAATA |
| 779 | GCCACGCAACTTCAAT |
| 780 | TGCCACGCAACTTCAA |
| 781 | ATCTGCCACGCAACTT |
| 782 | CATCTGCCACGCAACT |
| 783 | AGGCTAATAGGTTTAG |
| 784 | CGATTCACATTGACTT |
| 785 | TCGATTCACATTGACT |
| 786 | ATCGATTCACATTGAC |
| 787 | AGAACCTAAGATCGAT |
| 788 | TATGATGTGCCCATAC |
| 789 | TCCAAACTTAGTCAGC |
| 790 | GTCCAAACTTAGTCAG |
| 791 | GTACGATAAACTGTGA |
| 792 | GGTACGATAAACTGTG |
| 793 | AGGTACGATAAACTGT |
| 794 | CCTAGACATTGACCGG |
| 795 | TCCTAGACATTGACCG |
| 796 | TATGATGTGTAACCTC |
| 797 | CCTATGATGTGTAACC |
| 798 | ACCTATGATGTGTAAC |
| 799 | CTGATAAGTGGTATCC |
| 800 | TCACATAGGTATAGCC |
| 801 | GTTCACATAGGTATAG |
| 802 | GGTTCACATAGGTATA |
| 803 | GTTGGTTCACATAGGT |
| 804 | AGTTGGTTCACATAGG |
| 805 | GAGTCTTAACTATACC |
| 806 | GGAGTCTTAACTATAC |
| 807 | TCGTGTTAGGTTTGAG |
| 808 | ATCGTGTTAGGTTTGA |
| 809 | AATCGTGTTAGGTTTG |
| 810 | TCCTTAATCGTGTTAG |
| 811 | GTCCTTAATCGTGTTA |
| 812 | ATGGTGGTGTACTTGC |
| 813 | AGTCCTCTCGGCAAGA |
| 814 | AACCATTAGAGTCCTC |
| 815 | GAAACCATTAGAGTCC |
| 816 | CACGCAGAGATCAACA |
| 817 | TCACGCAGAGATCAAC |
| 818 | GTCACGCAGAGATCAA |
| 819 | AGTCACGCAGAGATCA |
| 820 | CAGTCACGCAGAGATC |
| 821 | TGATCTGGACGATGAG |
| 822 | AAAGTTGATCTGGACG |
| 823 | TAGGTTGGTCTAGGAA |
| 824 | TTAGGTTGGTCTAGGA |
| 825 | TCGAACTTAGCTTATG |
| 826 | GTACCCACCCTTACAA |
| 827 | GCTGACCCATAATAGG |
| 828 | CGCTGACCCATAATAG |
| 829 | TCGCTGACCCATAATA |
| 830 | ATGATAGAGTCGCTGA |
| 831 | AATGATAGAGTCGCTG |
| 832 | AAATGATAGAGTCGCT |
| 833 | CCGAAATGATAGAGTC |
| 834 | TCCGAAATGATAGAGT |
| 835 | TTCCGAAATGATAGAG |
| 836 | CTTTCCGAAATGATAG |
| 837 | GTTATATGCTTAGAGG |
| 838 | ACTAGAACCTTGACCC |
| 839 | TATCCCAGGTCACTAG |
| 840 | CTGAGAGTCATATCCC |
| 841 | CGCCACTGAGAGTCAT |
| 842 | ACGCCACTGAGAGTCA |
| 843 | TACGCCACTGAGAGTC |
| 844 | ATACGCCACTGAGAGT |
| 845 | CATACGCCACTGAGAG |
| 846 | ACATACGCCACTGAGA |
| 847 | AACATACGCCACTGAG |
| 848 | ATAAACATACGCCACT |
| 849 | CATAAACATACGCCAC |
| 850 | GACATAAACATACGCC |
| 851 | GATCCAATTAGAGTCC |
| 852 | TGATCCAATTAGAGTC |
| 853 | TGCCTTGGACTGATCC |
| 854 | ATGCCTTGGACTGATC |
| 855 | GATGCCTTGGACTGAT |
| 856 | TAGATAGGTGAGATCT |
| 857 | TTAGATAGGTGAGATC |
| 858 | ATCTCCGTGGTTTGAT |
| 859 | AATCTCCGTGGTTTGA |
| 860 | ACCTAATCTCCGTGGT |
| 861 | TACCTAATCTCCGTGG |
| 862 | GTACCTAATCTCCGTG |
| 863 | GTGGTAGCAAGTCTTA |
| 864 | GGTGGTAGCAAGTCTT |
| 865 | GCACCCTAACTATTTG |
| 866 | GGCACCCTAACTATTT |
| 867 | TGGCACCCTAACTATT |
| 868 | TTGGCACCCTAACTAT |
| 869 | TTTGGCACCCTAACTA |
| 870 | CTGAGTAGGACATTGG |
| 871 | CTCGACTAATCAGAAT |
| 872 | CCTCGACTAATCAGAA |
| 873 | CCCTCGACTAATCAGA |
| 874 | ACCCTCGACTAATCAG |
| 875 | CACCCTCGACTAATCA |
| 876 | ACACCCTCGACTAATC |
| 877 | AACACCCTCGACTAAT |
| 878 | AAACACCCTCGACTAA |
| 879 | CAAACACCCTCGACTA |
| 880 | TCAAACACCCTCGACT |
| 881 | ATCAAACACCCTCGAC |
| 882 | AATCAAACACCCTCGA |
| 883 | GAATCAAACACCCTCG |
| 884 | CGGTGATGTTGTGTTT |
| 885 | TCGGTGATGTTGTGTT |
| 886 | TTCGGTGATGTTGTGT |
| 887 | TTTCGGTGATGTTGTG |
| 888 | CTTTCGGTGATGTTGT |
| 889 | GCTTTCGGTGATGTTG |
| 890 | AGCTTTCGGTGATGTT |
| 891 | CAGCTTTCGGTGATGT |
| 892 | CCAGCTTTCGGTGATG |
| 893 | TCATGCCAGCTTTCGG |
| 894 | CATCTTGGGTATTTCG |
| 895 | GTAACCCATATCTGTG |
| 896 | GTATCACCTCAACACC |
| 897 | GAGCCTTGTCATCAAT |
| 898 | CTAGTGAGCCTTGTCA |
| 899 | CCTAGTGAGCCTTGTC |
| 900 | ACCTAGTGAGCCTTGT |
| 901 | TACCTAGTGAGCCTTG |
| 902 | ATACCTAGTGAGCCTT |
| 903 | TATACCTAGTGAGCCT |
| 904 | GTATACCTAGTGAGCC |
| 905 | GCACACATAGTTAGAG |
| 906 | TAGTATCAGTCCAGGG |
| 907 | CTAGTATCAGTCCAGG |
| 908 | ATCCATACTTCGGTGC |
| 909 | AATCCATACTTCGGTG |
| 910 | CAATCCATACTTCGGT |
| 911 | GCAATCCATACTTCGG |
| 912 | TGCAATCCATACTTCG |
| 913 | GTGCAATCCATACTTC |
| 914 | GATTCAACAGTCTAGG |
| 915 | CAATATAGATCACGGT |
| 916 | TCAATATAGATCACGG |
| 917 | CCCTTCAATATAGATC |
| 918 | GTATTGTCCATACTGC |
| 919 | GTGTATTGTCCATACT |
| 920 | AGTGTATTGTCCATAC |
| 921 | ATCTAGTGTATTGTCC |
| 922 | CATCTAGTGTATTGTC |
| 923 | GACACAACATCTAGTG |
| 924 | TAGTCTACTCACTGGT |
| 925 | ATAGTCTACTCACTGG |
| 926 | GCAATAGTCTACTCAC |
| 927 | GCTGCAATAGTCTACT |
| 928 | GGAGGTGCAATCACGC |
| 929 | ACGTCCTCAATCTCAA |
| 930 | AAATCCTACCCTACGT |
| 931 | GTATCCATTCCACCGG |
| 932 | GCTACCAGAAGAGTCC |
| 933 | ATTGGGATGATTAGCT |
| 934 | TATTGGGATGATTAGC |
| 935 | GTCTGCATTAGAGTGG |
| 936 | TGGAACGTTAATTGGA |
| 937 | ATGGAACGTTAATTGG |
| 938 | CTGAGGAAACGTTATA |
| 939 | ACCAGTATGACTCTTG |
| 940 | TTTGATAACCTCGAAC |
| 941 | CGAGTTAGCCACCATT |
| 942 | CCGAGTTAGCCACCAT |
| 943 | CCCGAGTTAGCCACCA |
| 944 | ACCCGAGTTAGCCACC |
| 945 | CACCCGAGTTAGCCAC |
| 946 | TCACCCGAGTTAGCCA |
| 947 | TTCACCCGAGTTAGCC |
| 948 | ATTCACCCGAGTTAGC |
| 949 | TAGGCTGGTATTGTGT |
| 950 | ATAGGCTGGTATTGTG |
| 951 | CATAGGCTGGTATTGT |
| 952 | CGAGACCACAACATAG |
| 953 | GCGAGACCACAACATA |
| 954 | TGCGAGACCACAACAT |
| 955 | ATGCGAGACCACAACA |
| 956 | CATGCGAGACCACAAC |
| 957 | CACGTAGCTTGGGAAG |
| 958 | ATCACGTAGCTTGGGA |
| 959 | AATCACGTAGCTTGGG |
| 960 | AAATCACGTAGCTTGG |
| 961 | GGAAATCACGTAGCTT |
| 962 | GGGAAATCACGTAGCT |
| 963 | TTAGGCATAATGGTTG |
| 964 | GGGCATAATAACTGAC |
| 965 | CGAAGATTGCCTCATG |
| 966 | TCGAAGATTGCCTCAT |
| 967 | ATCGAAGATTGCCTCA |
| 968 | GATCGAAGATTGCCTC |
| 969 | TCTGAATGGATCGAAG |
| 970 | GTCTGAATGGATCGAA |
| 971 | TGTCTGAATGGATCGA |
| 972 | TTGTCTGAATGGATCG |
| 973 | GAACCACCTCCTTAGT |
| 974 | GGATGATACCTGATTC |
| 975 | CGTTGAATTACTGGGA |
| 976 | CCTAAGAAACGTTGAA |
| 977 | TCCTAAGAAACGTTGA |
| 978 | ATCAATGGGAGTGCTA |
| 979 | CCCTCCACGAAATTAA |
| 980 | GCCCTCCACGAAATTA |
| 981 | TGCCCTCCACGAAATT |
| 982 | ATGCCCTCCACGAAAT |
| 983 | GATGCCCTCCACGAAA |
| 984 | AGATGCCCTCCACGAA |
| 985 | TCGTACTTGGAAGCCA |
| 986 | ATCGTACTTGGAAGCC |
| 987 | GATCGTACTTGGAAGC |
| 988 | AGATCGTACTTGGAAG |
| 989 | TAGATCGTACTTGGAA |
| 990 | ATAGATCGTACTTGGA |
| 991 | CATAGATCGTACTTGG |
| 992 | CCATAGATCGTACTTG |
| 993 | ACCATAGATCGTACTT |
| 994 | AACCATAGATCGTACT |
| 995 | GAACCATAGATCGTAC |
| 996 | GGAACCATAGATCGTA |
| 997 | GATTGTGATGTGCGAG |
| 998 | ACGTTTATTCCTGTAG |
| 999 | GTGAATTGTAAGTCGT |
| 1000 | CCGTGAATTGTAAGTC |
| 1001 | ACCGTGAATTGTAAGT |
| 1002 | GACCGTGAATTGTAAG |
| 1003 | GGACCGTGAATTGTAA |
| 1004 | TGGACCGTGAATTGTA |
| 1005 | TTGGACCGTGAATTGT |
| 1006 | TTTGGACCGTGAATTG |
| 1007 | TGCACATCTCGCTGGT |
| 1008 | ATGCACATCTCGCTGG |
| 1009 | TATGCACATCTCGCTG |
| 1010 | ATATGCACATCTCGCT |
| 1011 | CATATGCACATCTCGC |
| 1012 | TCATATGCACATCTCG |
| 1013 | GTATCATTGTTCAGCC |
| 1014 | ACCATACCTGTGTATC |
| 1015 | GGTTAGGTAGCATCAC |
| 1016 | AAGGTTAGGTAGCATC |
| 1017 | CAAGGTTAGGTAGCAT |
| 1018 | GGCTGTTGATGATTGC |
| 1019 | TACGATTCAAAGCCAC |
| 1020 | CTTACGATTCAAAGCC |
| 1021 | ACTTACGATTCAAAGC |
| 1022 | TTCCGAGTAAGATTTG |
| 1023 | CATTTCCGAGTAAGAT |
| 1024 | AGATGGATACCTTAGG |
| 1025 | ACGACCAACAGCTCTG |
| 1026 | AACGACCAACAGCTCT |
| 1027 | AAACGACCAACAGCTC |
| 1028 | CCAAACGACCAACAGC |
| 1029 | ACCAAACGACCAACAG |
| 1030 | CACCAAACGACCAACA |
| 1031 | CCACCAAACGACCAAC |
| 1032 | GCCACCAAACGACCAA |
| 1033 | AGAATCGTTTGTCTTG |
| 1034 | CTCAGAATCGTTTGTC |
| 1035 | ACTCAGAATCGTTTGT |
| 1036 | AACTCAGAATCGTTTG |
| 1037 | CGACTAGAGCCACATC |
| 1038 | CCGACTAGAGCCACAT |
| 1039 | ACCGACTAGAGCCACA |
| 1040 | GATATGAGCTATGGAC |
| 1041 | CTTCATTGACCGTGAG |
| 1042 | ACTTCATTGACCGTGA |
| 1043 | AACTTCATTGACCGTG |
| 1044 | AAACTTCATTGACCGT |
| 1045 | TAAACTTCATTGACCG |
| 1046 | CGTGAGATGTTAATAG |
| 1047 | CCGTGAGATGTTAATA |
| 1048 | CCCGTGAGATGTTAAT |
| 1049 | ACATCCTAGCATAATCT |
| 1050 | GTAACACCCAGCATCTG |
| 1051 | TGTAACACCCAGCATCT |
| 1052 | ATGATGTTTAGATGCTC |
| 1053 | GAACTTAGCTTATGATG |
| 1054 | AACGTTGAATTACTGGG |
| 1055 | AAACGTTGAATTACTGG |
| 1056 | AGGGCACATGTTGGATT |
| 1057 | AAGGGCACATGTTGGAT |
| 1058 | GCACCAGCCAGGACTCTA |
| 1059 | AAACCACGCACCAGCCAG |
| 1060 | CAGCCTTCAAGTAAATTC |
| 1061 | CTAATTCAGCCTTCAAGT |
| 1062 | GATACCTTCAGTCCCAAG |
| 1063 | TGATACCTTCAGTCCCAA |
| 1064 | TTGGTTCACATAGGTATAG |
| 1065 | GTTGGTTCACATAGGTATA |
| 1066 | TGAGGAGACAGCAATTCAC |
| 1067 | TTGAGGAGACAGCAATTCA |
| 1068 | GATGTGTAACCTCAATTTCT |
| 1069 | ACCTATGATGTGTAACCTCA |
| 1070 | GTACAGAATCCAATGACAGA |
| 1071 | AGTACAGAATCCAATGACAG |
| 1072 | AAACACCTTGTTCGCTTTGG |
| 1073 | GTCTCTCATTACAAATGGTG |
| 1074 | CTGCCGCTTGTAAACC |
| 1075 | ACTGCCGCTTGTAAAC |
| 1076 | AACTGCCGCTTGTAAA |
| 1077 | AAACTGCCGCTTGTAA |
| 1078 | GGAAACTGCCGCTTGT |
| 1079 | ATGAAGACACACCCGG |
| 1080 | CGACTAGAGCCACATC |
| 1081 | CCGACTAGAGCCACAT |
| 1082 | ACCGACTAGAGCCACA |
| 1083 | AACCGACTAGAGCCAC |
| 1084 | AAACCGACTAGAGCCA |
| 1085 | TAAACCGACTAGAGCC |
| 1086 | CTAAACCGACTAGAGC |
| 1087 | ACTAAACCGACTAGAG |
| 1088 | GACTAAACCGACTAGA |
| 1089 | GATTACCCACTTCAAG |
| 1090 | GAGCTATGTCATGTCC |
| 1091 | GACTTTGCACTTCGTA |
| 1092 | AGTTAGAGTTAGGCGT |
| 1093 | GACACCTCAAGTTAGA |
| 1094 | TGACACCTCAAGTTAG |
| 1095 | GTCTAGGTTGCACGTT |
| 1096 | GGTCTAGGTTGCACGT |
| 1097 | AACCTGCTAGATCTTG |
| 1098 | CAACCTGCTAGATCTT |
| 1099 | TCAACCTGCTAGATCT |
| 1100 | GAACACACTTCGAGAG |
| 1101 | AGCAGAACACACTTCG |
| 1102 | CGCTGTTCCATTAACA |
| 1103 | TAGTCTTAATCCTGGC |
| 1104 | CAAGGGATGATAGCTC |
| 1105 | GGATCACACTAAACCC |
| 1106 | CCAATAACCCATTGCC |
| 1107 | GCCAATAACCCATTGC |
| 1108 | TACCTTGCCAATAACC |
| 1109 | GTACCTTGCCAATAAC |
| 1110 | CACCCTAATAGTGTTG |
| 1111 | GTCTCACCCTAATAGT |
| 1112 | ACTTATGTGGCTCCGG |
| 1113 | CGGTTATACAGATGCT |
| 1114 | AGGCATGGATTATACC |
| 1115 | TAGGCATGGATTATAC |
| 1116 | ACCAGAGATCGCCCTC |
| 1117 | TACCAGAGATCGCCCT |
| 1118 | ATACCAGAGATCGCCC |
| 1119 | TATCCGTCAGGCAAAG |
| 1120 | GTATCCGTCAGGCAAA |
| 1121 | GAGATAGATTCTTCGT |
| 1122 | AGGCTACATTACCTCC |
| 1123 | CTAGGCTACATTACCT |
| 1124 | ACTAGGCTACATTACC |
| 1125 | CACTAGGCTACATTAC |
| 1126 | TCGTGTTTATTGCTGG |
| 1127 | GTTGATTGTGATCCAG |
| 1128 | GTTTGTGACGCCTGCC |
| 1129 | AGTTTGTGACGCCTGC |
| 1130 | AAGTTTGTGACGCCTG |
| 1131 | AAAGTTTGTGACGCCT |
| 1132 | GAGCCCATCTGATTGC |
| 1133 | CGTGACTCCAGAATGT |
| 1134 | CCGTGACTCCAGAATG |
| 1135 | ATGATCCTCCGTGACT |
| 1136 | GATGATCCTCCGTGAC |
| 1137 | GATTGAACACGTTGTT |
| 1138 | TGATTGAACACGTTGT |
| 1139 | TTGATTGAACACGTTG |
| 1140 | GTTGATTGAACACGTT |
| 1141 | AGTTGATTGAACACGT |
| 1142 | TAGTTGATTGAACACG |
| 1143 | GTAGTTGATTGAACAC |
| 1144 | AGGTAGTTGTAGGCTT |
| 1145 | GAGGTAGTTGTAGGCT |
| 1146 | GCCAGTCAATAATCCC |
| 1147 | GACCTTAGAGCCAGTC |
| 1148 | CCCTAGAATAAGTACC |
| 1149 | GCCCTAGAATAAGTAC |
| 1150 | ACTCTGCGTTAGGAAT |
| 1151 | CACTCTGCGTTAGGAA |
| 1152 | ACAGCCGACTCAAAGC |
| 1153 | TTACAGCCGACTCAAA |
| 1154 | AAGAGCATAACGTACC |
| 1155 | TAAGAGCATAACGTAC |
| 1156 | CTAAGAGCATAACGTA |
| 1157 | ACTAAGAGCATAACGT |
| 1158 | TACTAAGAGCATAACG |
| 1159 | CGCCCTGAAACCCAAC |
| 1160 | ATGAAACATCAATCCAG |
| 1161 | ATTAGCCATTCCCAGCC |
| 1162 | CAGCTTAAGGATGTATT |
| 1163 | TAGAACAGCTTAAGGAT |
| 1164 | GTTGACTCTGCCAATTA |
| 1165 | TGTTGACTCTGCCAATT |
| 1166 | GCCAATAACCCATTGCCA |
| 1167 | TGCCAATAACCCATTGCC |
| 1168 | TACCTAGTGACCCAATGC |
| 1169 | GTACCTAGTGACCCAATG |
| 1170 | TAAACACACTCGCTCACT |
| 1171 | ATAAACACACTCGCTCAC |
| 1172 | TTTACCTCGAATCAAGCT |
| 1173 | AAGTCATCTTCTGGTTGT |
| 1174 | ACATTTCAAGAAGCTACG |
| 1175 | CTAATGAGCATAGCCAGG |
| 1176 | CGACTAGAGCCACATCAGC |
| 1177 | AAACACCTTGTTCGCTTTG |
| 1178 | TCTCTCATTACAAATGGTG |
| 1179 | TAAACAGGTAAAGCTATCC |
| 1180 | CTTCCATCAGTATAAGATC |
| 1181 | GTACATACAGCTTAGATCA |
| 1182 | AGTACATACAGCTTAGATC |
| 1183 | GTATCAGCCTCTGTGAAAC |
| 1184 | TGTATCAGCCTCTGTGAAA |
| 1185 | AACTTACACATCTGCTTGA |
| 1186 | TAACTTACACATCTGCTTG |
| 1187 | GCTAAATTCTATTCAACCTG |
| 1188 | AAAGCTTCTCCTCTCATTGG |
| 1189 | GGCACAAATTAGAACAGCTT |
| 1190 | GGGCACAAATTAGAACAGCT |
| 1191 | ATCTGGTAACATCCTATGGC |
| 1192 | TAAAGATAGCACCATGCCAT |
| 1193 | TGTCATCTTTAAGCTACAGA |
| 1194 | TCTGTCATCTTTAAGCTACA |
| 1195 | CTTCAGTGTGGTGTTTGTAT |
| 1196 | TGATTTGACCCTGTAATTGC |
| 1197 | AAGCACATTAACACCCACTG |
| 1198 | GAAGCACATTAACACCCACT |

TABLE 7
ASO sequences targeting human
ENSG00000288903 (Chr9)

| SEQ | |
|---|---|
| ID | |
| NO. | Sequence |
| 1199 | GCCAAGGTTAGTGAGC |
| 1200 | GTCTAAAGATTGGGAT |
| 1201 | GCCTTAATCAGTTGTC |
| 1202 | CCATAACTTGATTAGC |
| 1203 | GCATGTTGGTCCCTAC |
| 1204 | TTGGACAACACTAGGG |
| 1205 | AGCACTAAGCGTCTTG |
| 1206 | AAGAGCACTAAGCGTC |
| 1207 | AGCAGCAAACGTCCTG |
| 1208 | CAGCAGCAAACGTCCT |
| 1209 | ACCCAGTAGCAAGTTG |
| 1210 | TCAATTACACCTGATC |
| 1211 | GGACACCTTAACTGCA |
| 1212 | CCCTACTGATGATCTG |
| 1213 | GTACCTAAGTCATCAG |
| 1214 | GGAAGTACCTAAGTCA |
| 1215 | GACTAACTACAGGAGT |
| 1216 | TGACTAACTACAGGAG |
| 1217 | GTTGACTAACTACAGG |
| 1218 | GGATGCACAACTTGAT |
| 1219 | AGCAATCCAAGCGTGC |
| 1220 | AAGCAATCCAAGCGTG |
| 1221 | GCAATAGCCGAAACAT |
| 1222 | GTATATCAGACCCTCA |
| 1223 | TGTATATCAGACCCTC |
| 1224 | GCTTAATTCTTCGGTG |
| 1225 | GGCTTAATTCTTCGGT |
| 1226 | GGGCTTAATTCTTCGG |
| 1227 | GCAATGTCCAATGACC |
| 1228 | GTGCAATGTCCAATGA |
| 1229 | CCTAAGTCATCGGAGA |
| 1230 | ACCTAAGTCATCGGAG |
| 1231 | TACCTAAGTCATCGGA |
| 1232 | GTACCTAAGTCATCGG |
| 1233 | AGTACCTAAGTCATCG |
| 1234 | GGAAGTACCTAAGTCA |
| 1235 | GACCCTGTAATTAGTC |
| 1236 | GTTCACATAGAGTATC |
| 1237 | GCATACACTCCCAATA |
| 1238 | AGTCTATCCAATCATG |
| 1239 | AGTGACCTACTTATCC |
| 1240 | GTTAGCTCACCAACAC |
| 1241 | TGTTAGCTCACCAACA |
| 1242 | TTGTTAGCTCACCAAC |
| 1243 | GGTTCATCCTGGTCAC |
| 1244 | TACTAAGACCCACAAC |
| 1245 | CCTTACTAAGACCCAC |
| 1246 | GCCATCCTATAACTAC |
| 1247 | TAAGCCATCCTATAAC |
| 1248 | GCCCTAATCAAGTAGA |
| 1249 | AGCCCTAATCAAGTAG |
| 1250 | GAATCTCTTATGGGTA |
| 1251 | TAACTCTCTAGTACAC |
| 1252 | CATAACTCTCTAGTAC |
| 1253 | GACACCTGATGTACAC |
| 1254 | GGACACCTGATGTACA |
| 1255 | AGGACACCTGATGTAC |
| 1256 | GACATGCCCTATGACA |
| 1257 | TCTATCAGAGGAACCC |
| 1258 | TATTGTCAGGCTACTC |
| 1259 | GTTACATCAACCCATC |
| 1260 | GCCAAACCCTAGTCTG |
| 1261 | GGCTTAATCCCTGAAC |
| 1262 | GATCCCAATTTAATCC |
| 1263 | TTGATGAGGTTAGATC |
| 1264 | TGATACATGAGTACGA |
| 1265 | CTGATACATGAGTACG |
| 1266 | GTAACTCAGCCTATGC |
| 1267 | ATCTTCATTGTGGGCC |
| 1268 | GGATCAGCCAATTTGC |
| 1269 | GAACCAGCCTACAGTT |
| 1270 | TTGAGAACCAGCCTAC |
| 1271 | TGATTCCCTGATAACC |
| 1272 | TGCTTAGACATAATCC |
| 1273 | GGTTGAAGATGCTTAG |
| 1274 | GCATGACGCAATATAA |
| 1275 | AAGCATGACGCAATAT |
| 1276 | GGATTACTAAATTGGG |
| 1277 | CTAGTCAGCTCAGATA |
| 1278 | GTTTGACATAACCAGT |
| 1279 | GATCCGTAAAGCATGG |
| 1280 | GTCTTGCCAGTCAGCT |
| 1281 | GGATTGCCAACTGTGA |
| 1282 | GGCAGCAATAAGGTTC |
| 1283 | GGTCAAGCTCCTCTAC |
| 1284 | CGGTCAAGCTCCTCTA |
| 1285 | CAATGGCATCGCTGGT |
| 1286 | ACCTGATATAGTCACC |
| 1287 | GCTACCTGATATAGTC |
| 1288 | GGCTACCTGATATAGT |
| 1289 | TTACTGAATACGGGCC |
| 1290 | TTTACTGAATACGGGC |
| 1291 | GATTTACTGAATACGG |
| 1292 | GTGATAATCCCTCAGC |
| 1293 | GACAAGCTCACTAAGG |
| 1294 | GCTAACACATAAGGGT |
| 1295 | GTGTACTCAACTCCAC |
| 1296 | TTATGGGCAGTCAGTC |
| 1297 | GTATTATGGGCAGTCA |
| 1298 | TGTATTATGGGCAGTC |
| 1299 | CTTCTTAGCATAAGCG |
| 1300 | ATGATAGTCCCTCTGG |
| 1301 | AACATGATAGTCCCTC |
| 1302 | GTAACATGATAGTCCC |
| 1303 | AGTAACATGATAGTCC |
| 1304 | TTTGGTAAACTGGGCC |
| 1305 | GTAACTACATCAGGTA |
| 1306 | GTCCAAGTTACTGATC |
| 1307 | GCAATTAGGTAGAGTT |
| 1308 | CCGGCAATTAGGTAGA |
| 1309 | CTTTATCCAAAGCCGG |
| 1310 | TCTTTATCCAAAGCCG |
| 1311 | ACTAGATTGTGTATGC |
| 1312 | GACCTTTACTAGATTG |
| 1313 | GTGACCTTTACTAGAT |
| 1314 | AATGTATAGGGCTTGC |
| 1315 | GTCCCATAACCCATGC |
| 1316 | AGTCCCATAACCCATG |
| 1317 | ATGAAGTCCCATAACC |
| 1318 | CAATCAGGCTCTAAGC |
| 1319 | GTATTACCAGCCATCA |
| 1320 | CAAGCTACAAGATTGC |
| 1321 | GTCCTATGATACCAAC |
| 1322 | GAGTCCTATGATACCA |
| 1323 | AGAGTCCTATGATACC |
| 1324 | AAGAGTCCTATGATAC |
| 1325 | CTTACAGGGTGGACAT |
| 1326 | ATCTTACAGGGTGGAC |
| 1327 | GAATAGCCTAGCTCTG |
| 1328 | GGAATAGCCTAGCTCT |
| 1329 | GCCTGGACCGTGATCA |
| 1330 | CTCTAGTTGTGAAGTG |
| 1331 | TACCAGTACTTACAGC |
| 1332 | AAGCTCCAACGTTAAC |
| 1333 | GAAGCTCCAACGTTAA |
| 1334 | TAGGAGGTTAGTTAAC |
| 1335 | TTGTAGGAGGTTAGTT |
| 1336 | ATTGTAGGAGGTTAGT |
| 1337 | TGATTGTAGGAGGTTA |
| 1338 | GTGATTGTAGGAGGTT |
| 1339 | TTAGGTAAGCTGTGAC |
| 1340 | CCCTCAGCATAACTAC |
| 1341 | CGACAACTTGCCTCCA |
| 1342 | ACCGACAACTTGCCTC |
| 1343 | CACCGACAACTTGCCT |
| 1344 | ACACCGACAACTTGCC |
| 1345 | AACACCGACAACTTGC |
| 1346 | TAGCAACCATATAGCT |
| 1347 | TTAGCAACCATATAGC |
| 1348 | CATTAGTTGTGTTAGC |
| 1349 | GGAGACCTAACAGTTC |
| 1350 | TGGGACATTTAGGGTC |
| 1351 | GTCAACTAAGCACTGG |
| 1352 | AGACACAGCATCGATC |
| 1353 | TAGACACAGCATCGAT |
| 1354 | TTAGACACAGCATCGA |
| 1355 | GTTAGACACAGCATCG |
| 1356 | GGTTAGACACAGCATC |
| 1357 | GCAGCCTACAAGACTA |
| 1358 | TAGTTATACCACAGCC |
| 1359 | GTAGTTATACCACAGC |
| 1360 | TGCGAATGTATGAGTG |
| 1361 | CATAGGTGTTGTGCGA |
| 1362 | GACCTTAGCACTGTCC |
| 1363 | GTCAATGCAACCTACT |
| 1364 | GCCAGGTCAATGCAAC |
| 1365 | AGCCCATCCATAGTGA |
| 1366 | ACAGCCCATCCATAGT |
| 1367 | GGTAGACTGTTGAATG |
| 1368 | CTAGGTAGACTGTTGA |
| 1369 | TCTAGGTAGACTGTTG |
| 1370 | GGTACAATATCTCTCC |
| 1371 | TCAGTCTATCAGGTAC |
| 1372 | GTAGGTTCACAGCTAG |
| 1373 | GAGTAGGTTCACAGCT |
| 1374 | GGAGTAGGTTCACAGC |
| 1375 | TTTGGCAACCCATTGC |
| 1376 | GTTGGCATACTTTGGC |
| 1377 | GAGAGTCAGTGTTACC |
| 1378 | TCGGGTTGGTGGTGAG |
| 1379 | GTCAACACTAACTTGC |
| 1380 | GGTCAACACTAACTTG |
| 1381 | ATGGAAGATCATACCC |
| 1382 | GGCACAACATACTGTC |
| 1383 | TAGGACTATGCACAAG |
| 1384 | GAACTTAGCACACTAG |
| 1385 | GGAACTTAGCACACTA |
| 1386 | TAGGAACTTAGCACAC |
| 1387 | GCAACCTGATGAGTAG |
| 1388 | TAGCAACCTGATGAGT |
| 1389 | GTAGCAACCTGATGAG |
| 1390 | TTAAGCAGTAGCAACC |
| 1391 | AACCTTAAGCAGTAGC |
| 1392 | GAACCTTAAGCAGTAG |
| 1393 | GGAACCTTAAGCAGTA |
| 1394 | GGGAACCTTAAGCAGT |
| 1395 | CTTCGATCTCAGGGCT |
| 1396 | GTACTTGGACTTCACC |
| 1397 | CCCAAGGTTAGAGTAC |
| 1398 | CAGTAAGGCATCGTTT |
| 1399 | CCAGTAAGGCATCGTT |
| 1400 | TCCAGTAAGGCATCGT |
| 1401 | ACCAAGAGTTGAGTAC |
| 1402 | TAGCACTACAATATCC |
| 1403 | CTGAGTTACGGTTAGC |
| 1404 | TCTGAGTTACGGTTAG |
| 1405 | ATCTGAGTTACGGTTA |
| 1406 | TATCTGAGTTACGGTT |
| 1407 | ATATCTGAGTTACGGT |
| 1408 | GTGGAGTGATTGATAC |
| 1409 | CGTGGAGTGATTGATA |
| 1410 | GCAGCTTAGATGATAC |
| 1411 | CTATGGACTTACTGGT |
| 1412 | GAACTATGGACTTACT |
| 1413 | GGAACTATGGACTTAC |
| 1414 | GGGAACTATGGACTTA |
| 1415 | CGTCAATGTGAAGATT |
| 1416 | GCGTCAATGTGAAGAT |
| 1417 | GAAACACGGATGGTTC |
| 1418 | GCACAGGTCTCATATG |
| 1419 | ATGTTAGGTTGGAGTC |
| 1420 | GTTGACACTTATCTGG |
| 1421 | GGTGTTCAAAGTTGAC |
| 1422 | TGGGTAACTATTGAGG |
| 1423 | CTGGATTACTATCAGG |
| 1424 | GCTGGATTACTATCAG |
| 1425 | CTGCTGGATTACTATC |
| 1426 | GTTGACCCTATTGATT |
| 1427 | TGTTGACCCTATTGAT |
| 1428 | CTGTTGACCCTATTGA |
| 1429 | GCTGTTGACCCTATTG |
| 1430 | GTGCTGTTGACCCTAT |
| 1431 | TGTGCTGTTGACCCTA |
| 1432 | GTGTGCTGTTGACCCT |
| 1433 | ATAGGGCTTGAATCAG |
| 1434 | TAACTGGGATAGGGCT |
| 1435 | GCTGAACCTTGTGATA |
| 1436 | GTGCTGAACCTTGTGA |
| 1437 | GACTGTTGAACTGGCC |
| 1438 | GGACTGTTGAACTGGC |
| 1439 | GGGACTGTTGAACTGG |
| 1440 | TAGGGACTGTTGAACT |
| 1441 | GTAGGGACTGTTGAAC |
| 1442 | GCAGTTAGTAGTATCT |
| 1443 | AGCAGTTAGTAGTATC |
| 1444 | GGAAACTAGCCTTAGG |
| 1445 | GTTGGTATAGAGCATG |
| 1446 | AGTTGGTATAGAGCAT |
| 1447 | TAAGTTGGTATAGAGC |
| 1448 | GGTTATCAGTAGGCTT |
| 1449 | GGGTTATCAGTAGGCT |
| 1450 | TGGGTTATCAGTAGGC |
| 1451 | CGTTCAAAGGGCATGG |
| 1452 | GCTAGGACACAGACGC |
| 1453 | GTAGACCACATCACTT |
| 1454 | ACGGTCCTCCCAAATC |
| 1455 | CACGGTCCTCCCAAAT |
| 1456 | GTCCACCCTTAGAAGA |
| 1457 | TGTCCACCCTTAGAAG |
| 1458 | GATGTCCACCCTTAGA |
| 1459 | TGATGTCCACCCTTAG |
| 1460 | GCTCATAATGATGTCC |
| 1461 | GTATTAGATGGAATCC |
| 1462 | CTTAGTTGGTAGTATC |
| 1463 | GGTCCTAGTAAACACT |
| 1464 | GCTCATAGAGGTCTTA |
| 1465 | GTCAGTGCAAGTAAGT |
| 1466 | GGCAGTTCAGTCCTCC |
| 1467 | CTTGGCAGTTCAGTCC |
| 1468 | CTAACCTATCCTATGG |
| 1469 | GCTAACCTATCCTATG |
| 1470 | ACAAGCTAACCTATCC |
| 1471 | TACAAGCTAACCTATC |
| 1472 | CGAAGACTTGGTTCAT |
| 1473 | GCTTTGTGGTTTGCGA |
| 1474 | ATTAAAGTAAGCCCGG |
| 1475 | CATTAAAGTAAGCCCG |
| 1476 | GCATTAAAGTAAGCCC |
| 1477 | AGTATTGAACTAGCCT |
| 1478 | CAAGTATTGAACTAGC |
| 1479 | CAGTACAACCTAGCCC |
| 1480 | CCAGTACAACCTAGCC |
| 1481 | CCCAGTACAACCTAGC |
| 1482 | TAGTGGTGGTTTACGG |
| 1483 | ATAGTGGTGGTTTACG |
| 1484 | TATAGTGGTGGTTTAC |
| 1485 | GTGGTAGATTGGATTC |
| 1486 | GTGTGGTAGATTGGAT |
| 1487 | TTGTGTGGTAGATTGG |
| 1488 | CTTGGGTAAGGTTCAA |
| 1489 | CTCTTGGGTAAGGTTC |
| 1490 | AGGACTAATACACGTA |
| 1491 | GGTCCCAATACTATCC |
| 1492 | GTTACCTCCAAGCAAT |
| 1493 | GTTACACCAGAGCAGC |
| 1494 | GATGAGTGTCTAAACC |
| 1495 | GGAGTAGGGTCATTTA |
| 1496 | CTAGCTTTATGGAACC |
| 1497 | TTCTCACAGCGAACCC |
| 1498 | TTTCTCACAGCGAACC |
| 1499 | GCCTCCCATCAATGAT |
| 1500 | GCATCATACGACATTC |
| 1501 | GCAGATTGTAGGGTAC |
| 1502 | GTTGCTACACTTGCCA |
| 1503 | AGTTGCTACACTTGCC |
| 1504 | CAGTTGCTACACTTGC |
| 1505 | CCAGTTGCTACACTTG |
| 1506 | AGTCACCCTCTAATTG |
| 1507 | GTAAGTCACCCTCTAA |
| 1508 | GCAGTAAGTCACCCTC |
| 1509 | TTGCAAGATTCCGCTT |
| 1510 | ATTGCAAGATTCCGCT |
| 1511 | TATTGCAAGATTCCGC |
| 1512 | TGTATTAGTGGCTTGC |
| 1513 | CTATGTATTAGTGGCT |
| 1514 | GGTATAGCAGACACTC |
| 1515 | GGGTCTCCATCATTGT |
| 1516 | GCATTACATGGGTCTC |
| 1517 | GCTAATGGGTTTGTGC |
| 1518 | CGGAATAAAGTTGCTA |
| 1519 | CTTAGTTAGAAGGTGT |
| 1520 | CAACTTAGTTAGAAGG |
| 1521 | GGTGTCCCAAGTAAAC |
| 1522 | CTCATTGACTTGCAAC |
| 1523 | TGGAGTTGTACTGAAC |
| 1524 | GGACTGGAGTTGTACT |
| 1525 | ATAATTCAACGCAGTG |
| 1526 | CAGAATAATTCAACGC |
| 1527 | GATAGTTTGCCTACTC |
| 1528 | GGATAGTTTGCCTACT |
| 1529 | AATAGGATAGTTTGCC |
| 1530 | GAATAGGATAGTTTGC |
| 1531 | GTTCTAAGGTGTCAAG |
| 1532 | GAAGTTCTAAGGTGTC |
| 1533 | TGGACAGTTACAGACC |
| 1534 | CTCGTATTGAAAGGTA |
| 1535 | TCTCGTATTGAAAGGT |
| 1536 | ATCTCGTATTGAAAGG |
| 1537 | ACTGCTCCTGATATAG |
| 1538 | CCCTTGCAGATGATAC |
| 1539 | TTTAGTAAGGATCACC |
| 1540 | GTTAGGCATATCATAC |
| 1541 | GGTGCTAATAACTCCT |
| 1542 | GTGGGTGCTAATAACT |
| 1543 | GTGTTAGTCATGTACA |
| 1544 | AGTGTTAGTCATGTAC |
| 1545 | GAAGTTTATGTGATCC |
| 1546 | GGTTAGGGAATCATTC |
| 1547 | ATTATTGCCCTACTAG |
| 1548 | GTGTATCCACTCAACC |
| 1549 | AAATATTCCCTCCGGC |
| 1550 | GTCCACCAGTAGATTT |
| 1551 | GCCAGTGTTGTCTACC |
| 1552 | GGGAGTATGAGCTGTT |
| 1553 | GGCTTGTAATACCTAC |
| 1554 | CGGCTTGTAATACCTA |
| 1555 | CCGGCTTGTAATACCT |
| 1556 | GGTCTCTACACTAGTT |
| 1557 | GACCTAAGCCAGATTA |
| 1558 | GATTAGACCAGACCCT |
| 1559 | AGATTAGACCAGACCC |
| 1560 | AGGATACTTAACCCTC |
| 1561 | GAGGATACTTAACCCT |
| 1562 | GGAGGATACTTAACCC |
| 1563 | GCATCCTACATCAACC |
| 1564 | GGCATCCTACATCAAC |
| 1565 | ACGTTGCCTCTGTGTG |
| 1566 | CTGTATTGGATAAACC |
| 1567 | GGCTATCACACTCAGA |
| 1568 | GTAAGGCACCCATGAG |
| 1569 | AGTAAGGCACCCATGA |
| 1570 | CAGTAAGGCACCCATG |
| 1571 | GACCGCTCAGTAAGGC |
| 1572 | GGACCGCTCAGTAAGG |
| 1573 | GTGGAACCTTTAACTG |
| 1574 | GTGCAAGTAGATTACA |
| 1575 | TGTGCAAGTAGATTAC |
| 1576 | GCCGAGTCTTCATGTC |
| 1577 | TGCAGTAGACTAGGGT |
| 1578 | TGTGCAGTAGACTAGG |
| 1579 | GTTGACATTGCTTGCC |
| 1580 | GTCATTACTGGATTAG |
| 1581 | GGTACAGTTTGGCTTA |
| 1582 | GTGGGTAGTATGTCAT |
| 1583 | GTCCATATGTAGAGTA |
| 1584 | CAATGTGTGTTGCGGG |
| 1585 | TCAATGTGTGTTGCGG |
| 1586 | GTCAATGTGTGTTGCG |
| 1587 | GGTCAATGTGTGTTGC |

TABLE 8
ASO sequences targeting human
ENSG00000230838 (Chr2)

| SEQ | |
|---|---|
| ID | |
| NO. | Sequence |
| 1588 | TCTTACGTGTCTGAAG |
| 1589 | CTCTTACGTGTCTGAA |
| 1590 | ACTCTTACGTGTCTGA |
| 1591 | TATGACTCTTACGTGT |
| 1592 | ATATGACTCTTACGTG |
| 1593 | TACCTTGAGTGACCCA |
| 1594 | TTACCTTGAGTGACCC |
| 1595 | TCGGTAATGCTATGCA |
| 1596 | ATCGGTAATGCTATGC |
| 1597 | CGCTCTTGGTTGACAT |
| 1598 | TCGCTCTTGGTTGACA |
| 1599 | GTCATTGTATAGCCAG |
| 1600 | CTGTCATTGTATAGCC |
| 1601 | CTTGAGTACCTTACAC |
| 1602 | GACCCTAGCACTTGAG |
| 1603 | AGACCCTAGCACTTGA |
| 1604 | GATTGGGCTTGGACAC |
| 1605 | TGATTGGGCTTGGACA |
| 1606 | TTGATTGGGCTTGGAC |
| 1607 | CGATAGTTCAGTCTTC |
| 1608 | GCGATAGTTCAGTCTT |
| 1609 | TGCGATAGTTCAGTCT |
| 1610 | GTGCGATAGTTCAGTC |
| 1611 | TGTGCGATAGTTCAGT |
| 1612 | ATGTGCGATAGTTCAG |
| 1613 | AATGTGCGATAGTTCA |
| 1614 | TAATGTGCGATAGTTC |
| 1615 | GTAATGTGCGATAGTT |
| 1616 | GGTAATGTGCGATAGT |
| 1617 | TAGGTAATGTGCGATA |
| 1618 | TTAGGTAATGTGCGAT |
| 1619 | CTTAGGTAATGTGCGA |
| 1620 | TCTTAGGTAATGTGCG |
| 1621 | ATCTGTCACACACCGG |
| 1622 | AATCTGTCACACACCG |
| 1623 | CTGGTGGTTGGTACAA |
| 1624 | TGAAGTAGCCATAGCC |
| 1625 | CTATTATACCAGAGGC |
| 1626 | CGACATTTCAGCACTT |
| 1627 | ACGACATTTCAGCACT |
| 1628 | TACGACATTTCAGCAC |
| 1629 | GTACGACATTTCAGCA |
| 1630 | AGTACGACATTTCAGC |
| 1631 | CAGTACGACATTTCAG |
| 1632 | TCAGTACGACATTTCA |
| 1633 | TGAAGTGTCAGTACGA |
| 1634 | GGAGTCTAGGTAGCTA |
| 1635 | GAAGGCACCCTACACT |
| 1636 | GTGAAGGCACCCTACA |
| 1637 | GAAGATTACCTAGCAG |
| 1638 | GGCATAGAAGATTACC |
| 1639 | CCATTAGGGCATAGAA |
| 1640 | GACGTGGTTCTCCTAT |
| 1641 | CCAGAACTATTACGAA |
| 1642 | ACCAGAACTATTACGA |
| 1643 | GTACCAGAACTATTAC |
| 1644 | GCAGTACCAGAACTAT |
| 1645 | GGTCTCTTTACTGGAC |
| 1646 | CCATCAGCAGTACCGT |
| 1647 | CATTGTGTTGGGACGT |
| 1648 | GCATTGTGTTGGGACG |
| 1649 | GACCTTTAGCCACTCA |
| 1650 | CCTTGACCATATTGCA |
| 1651 | GACCCATTATAGTTTC |
| 1652 | CAGACCCATTATAGTT |
| 1653 | TACAGACCCATTATAG |
| 1654 | GCTATTACAGACCCAT |

TABLE 9
ASO sequences targeting human
ENSG00000244137 (Chr1)

| SEQ | |
|---|---|
| ID | |
| NO. | Sequence |
| 1655 | CAGCACGTTTCTTAGC |
| 1656 | GCAGCACGTTTCTTAG |
| 1657 | TGCAGCACGTTTCTTA |
| 1658 | TGATGTGTGTGGACCC |
| 1659 | CTATGGGTGATGTTAG |
| 1660 | GTGAACACCTCCTAGA |
| 1661 | GTCTACCTATGAACTA |
| 1662 | GCTAGAGGAATTGTAT |
| 1663 | GACCCAGTGAACCTAG |
| 1664 | GTATGTAACCTGGAGC |
| 1665 | TTTGTGAACTTTCCGG |
| 1666 | CAAGACTGCCTAGTGG |
| 1667 | ACAAGACTGCCTAGTG |
| 1668 | GACATCCTTAGCCAGC |
| 1669 | CTTCAATAGTGCAGAC |
| 1670 | GCACAGTAGAGTAATC |
| 1671 | GACGTATCCTTCCAAA |
| 1672 | TCATAAGAGAGTAGCC |
| 1673 | TGGATGAAGGCGTATT |
| 1674 | GTATTGACCATGCCTC |
| 1675 | GGTCGTATAATACTTC |
| 1676 | GGGTCGTATAATACTT |
| 1677 | AGGGTCGTATAATACT |
| 1678 | AAGGGTCGTATAATAC |
| 1679 | CTAAGGGTCGTATAAT |
| 1680 | TGCAACAGTCTATGGT |
| 1681 | GTTATGAGGATGGTTC |
| 1682 | ATCGTATGGATGGGCC |
| 1683 | GACAACATTCCATCGT |
| 1684 | GTTAACCCTGTACCCA |
| 1685 | GTGTTAACCCTGTACC |
| 1686 | GCGTAGACATATAATG |
| 1687 | CGATGCAGGTTTATAG |
| 1688 | ACGATGCAGGTTTATA |
| 1689 | GCTGATTTGTAGGTAG |
| 1690 | GGCTGATTTGTAGGTA |
| 1691 | GGGCTGATTTGTAGGT |
| 1692 | CAAGCGACCACACTGC |
| 1693 | ACAAGCGACCACACTG |
| 1694 | GACAAGCGACCACACT |
| 1695 | GGACAAGCGACCACAC |
| 1696 | GAGTAAGTGCCAACCC |
| 1697 | AGAGTAAGTGCCAACC |
| 1698 | AGATGCGGGACTATTT |
| 1699 | CAGATGCGGGACTATT |
| 1700 | CCAGATGCGGGACTAT |
| 1701 | GCCTTAGATCCATGAT |
| 1702 | GTGCCTTAGATCCATG |
| 1703 | AGTGCCTTAGATCCAT |
| 1704 | GAGTGCCTTAGATCCA |
| 1705 | TCCTCATCAATAGGTC |
| 1706 | AGGTCTATGTCAGTGC |
| 1707 | CATAACACACGGCTAG |
| 1708 | GCATAACACACGGCTA |
| 1709 | AGCATAACACACGGCT |
| 1710 | CAGCATAACACACGGC |
| 1711 | ACAGCATAACACACGG |
| 1712 | CACAGCATAACACACG |
| 1713 | GTTAGAAGCACTCCAC |
| 1714 | AGGCTTCAGGACGGAC |
| 1715 | TAGAGTTCAGCCCTCC |
| 1716 | GCAGGAGTTTCAGTCG |
| 1717 | AAGCGGTGAATGTTGC |
| 1718 | CGCAGAAGTTGTCAGA |
| 1719 | AGAGGTTCATGCGGGT |
| 1720 | TAAAGAGGTTCATGCG |
| 1721 | ACCACAGGATCGGATG |
| 1722 | GACCACAGGATCGGAT |
| 1723 | GGTGCTAATGACTCTA |
| 1724 | GGTCCCTATTCAATTG |
| 1725 | GTATAAGCCTAGCTCA |
| 1726 | CTATGCACCTATTTGG |
| 1727 | AGTTCTGTTCGATGTC |
| 1728 | AAGTTCTGTTCGATGT |
| 1729 | AAAGTTCTGTTCGATG |
| 1730 | GTATGGGATTCAGGTG |
| 1731 | ATGGAGTATGGGATTC |
| 1732 | GTAGACATTGACCTTC |
| 1733 | GGTCTAACACAATGGC |
| 1734 | GAACGGATGCCAGCAC |
| 1735 | CCTTAGAAGCAGAACG |
| 1736 | CGATAGTGAGTTTGCA |
| 1737 | ACGATAGTGAGTTTGC |
| 1738 | TCATAGGTGATGGGAC |
| 1739 | GTTCAAGGTCTCGCAC |
| 1740 | GGTTCAAGGTCTCGCA |
| 1741 | AGGTTCAAGGTCTCGC |
| 1742 | ACTTCTACTAGGGCTA |
| 1743 | GTGCTATAACCAAGAC |
| 1744 | TTCGAGAGAGGAATTC |
| 1745 | TTGAACGTCATAGTGA |
| 1746 | TTTGAACGTCATAGTG |
| 1747 | GCTATCCTCGTGATAC |
| 1748 | GCCCTTGTTAAAGTAC |
| 1749 | GGTGCTGCTATTCTAC |
| 1750 | TTATGCGTCTTTGGAG |
| 1751 | TTTATGCGTCTTTGGA |
| 1752 | GTTTATGCGTCTTTGG |
| 1753 | CTACCACTCAATAGGC |
| 1754 | TATGTTATGGATGCCC |
| 1755 | GTTATGTTATGGATGC |
| 1756 | GGTTTAGCTCTCAGAC |
| 1757 | GCATTGGTTTAGCTCT |
| 1758 | GACCCAAGTTATGCCA |
| 1759 | AGACCCAAGTTATGCC |
| 1760 | GAGACCCAAGTTATGC |
| 1761 | GACATCTCTTATGGGT |
| 1762 | ATCCATGCAGATTGAC |
| 1763 | ACCCTGTATGAGATCC |
| 1764 | TACCCTGTATGAGATC |
| 1765 | GTACCCTGTATGAGAT |
| 1766 | AGTACCCTGTATGAGA |
| 1767 | TATGAAGTCTAGTGGG |
| 1768 | TTAGATTGGTGGCATG |
| 1769 | GAATTAGATTGGTGGC |
| 1770 | TTTCGTTTAGTGAGAG |
| 1771 | AGCTAGATAAGTCTCC |
| 1772 | GACCCTATTACCAAGA |
| 1773 | GCAAGGCACATATCCC |
| 1774 | GAGTACATCCTGATTC |
| 1775 | GTCCATGAATTGTGTC |
| 1776 | TGACAATCGGCTATGC |
| 1777 | CTGACAATCGGCTATG |
| 1778 | ATGTGCTGACAATCGG |
| 1779 | AATGTGCTGACAATCG |
| 1780 | GGAGGAGTGTAGTTTC |
| 1781 | TCATGTTTGGTAGGAC |
| 1782 | GACTTATTGAACAGGG |
| 1783 | GGACTTATTGAACAGG |
| 1784 | TAGCAGACTAGACCCA |
| 1785 | TTAGCAGACTAGACCC |
| 1786 | TTTAGCAGACTAGACC |
| 1787 | GCCCACCATCAAGTAG |
| 1788 | ATCCTACTCAAACGGC |
| 1789 | GGTCAATCCTACTCAA |
| 1790 | AATCCTCGGTGGCAAA |
| 1791 | CAATCCTCGGTGGCAA |
| 1792 | GTCCAGTGAATGCTAT |
| 1793 | CCTCATTCACACGAAC |
| 1794 | CCCTCATTCACACGAA |
| 1795 | CTCATGCCAGTTTAGC |
| 1796 | GACTCATGCCAGTTTA |
| 1797 | AACCTCACTCCCGATG |
| 1798 | GCAACCTCACTCCCGA |
| 1799 | GGTAGTTCAGGTCTCC |
| 1800 | ACAGACACCTCGTGCC |
| 1801 | TACAGACACCTCGTGC |
| 1802 | TTACAGACACCTCGTG |
| 1803 | GTACTATGATCTCTTG |
| 1804 | GATGTACTATGATCTC |
| 1805 | GCACTAACTTCCTAGC |
| 1806 | CGGCACTAACTTCCTA |
| 1807 | TCTCACTTGGACACCG |
| 1808 | CGTGCCCAAACCTGAC |
| 1809 | ACGTGCCCAAACCTGA |
| 1810 | GGTCTACTTTAACATC |
| 1811 | GTCCTCTACAGCAAGC |
| 1812 | GCACTCCAACACTATC |
| 1813 | TAGCACTCCAACACTA |
| 1814 | CTTAGCACTCCAACAC |
| 1815 | TTACGTATGAATTCCC |
| 1816 | CTTACGTATGAATTCC |
| 1817 | GATGTACCTCCTGCAA |
| 1818 | GCTCTAGGATGTACCT |
| 1819 | AGCTCTAGGATGTACC |
| 1820 | CAGCTCTAGGATGTAC |
| 1821 | GAGTGATCCATTGCCC |
| 1822 | TGAGTGATCCATTGCC |
| 1823 | GTGAGTGATCCATTGC |
| 1824 | CGTCCATGTGAGTGAT |
| 1825 | AGAGCGTCCATGTGAG |
| 1826 | AAGAGCGTCCATGTGA |
| 1827 | CTCGGAAATTCACAGC |
| 1828 | GGAAACTCGGAAATTC |
| 1829 | GGTGCTTGAGAGATTC |
| 1830 | CCATGAGGGTTTAGGT |
| 1831 | CTCATTATGACAGTCC |
| 1832 | AGTAGTGAATAGACCC |
| 1833 | CAGTAGTGAATAGACC |
| 1834 | GGTAACACTAGCTGCA |
| 1835 | TATATCTGTGGAGGGC |
| 1836 | GTACCTATATCTGTGG |
| 1837 | GCAGTACCTATATCTG |
| 1838 | GGCAGTACCTATATCT |
| 1839 | GCTCCAACCAATCAAG |
| 1840 | TCTTGATGAGAGGTAC |
| 1841 | TAGCCTGACACACCTC |
| 1842 | TCTAGCCTGACACACC |
| 1843 | CGGTTTGTTGAAGAGT |
| 1844 | CTCGGTTTGTTGAAGA |
| 1845 | TCTCGGTTTGTTGAAG |
| 1846 | CTCTCGGTTTGTTGAA |
| 1847 | GCTCTCGGTTTGTTGA |
| 1848 | AGCTCTCGGTTTGTTG |
| 1849 | TACACCCAGATTAGAG |
| 1850 | GTTACTAAGCAGGTCT |
| 1851 | AGTTACTAAGCAGGTC |
| 1852 | GACCCAGTGAGTAGTT |
| 1853 | AGCTTGTCCATTAAGG |
| 1854 | GTAAGGCATTATCACC |
| 1855 | GGGTACAGACAACATC |
| 1856 | CGGGTACAGACAACAT |
| 1857 | GCGAGGTCACATACAA |
| 1858 | AGCGAGGTCACATACA |
| 1859 | CAGCGAGGTCACATAC |
| 1860 | CCAGCGAGGTCACATA |
| 1861 | GGCACACCTAGCTCAC |
| 1862 | ACTATTTGGAGGCGGC |
| 1863 | AACTATTTGGAGGCGG |
| 1864 | GAACTATTTGGAGGCG |
| 1865 | GTGACCTACTTTGAAC |
| 1866 | TGAAGGCACCGCATGG |
| 1867 | TTGAAGGCACCGCATG |
| 1868 | GTTGAAGGCACCGCAT |
| 1869 | CATGTGAGTAGGGTTG |
| 1870 | TGTATTAGCCAGACCC |
| 1871 | GTAGTTGTGAGTAACT |
| 1872 | TGTAGTTGTGAGTAAC |
| 1873 | ACTCTAACTTTCACGA |
| 1874 | GCCCACCTTGCATCAA |
| 1875 | GGTCAGTCACCCTATC |
| 1876 | GGACTACTCTTTACCA |
| 1877 | AGGACTACTCTTTACC |
| 1878 | CTGGTTAGTTGATAAC |
| 1879 | CGAAGAGTTGATGTTA |
| 1880 | CCGAAGAGTTGATGTT |
| 1881 | TCCGAAGAGTTGATGT |
| 1882 | CTCCGAAGAGTTGATG |
| 1883 | TTCCACGTAACAACAG |
| 1884 | TATTCCACGTAACAAC |
| 1885 | GTATTCCACGTAACAA |
| 1886 | GATTGCTCACTCAAGC |
| 1887 | GTTGGACTCTTTGGGA |
| 1888 | CATCCTCTGAATGCGT |
| 1889 | ACATCCTCTGAATGCG |
| 1890 | GCCAAAGGTATCACTC |
| 1891 | ACGAGTCCCATTCTTG |
| 1892 | TCACCACGAGTCCCAT |
| 1893 | TAATCACCACGAGTCC |
| 1894 | TTAATCACCACGAGTC |
| 1895 | ATTAATCACCACGAGT |
| 1896 | GTGTAGTTCTGGTCTG |
| 1897 | GGTGTAGTTCTGGTCT |
| 1898 | GTGGTGTAGTTCTGGT |
| 1899 | GCTTGAACTTATATGG |
| 1900 | GGCTTGAACTTATATG |
| 1901 | AACTCGTTTAGCAGCT |
| 1902 | AAACTCGTTTAGCAGC |
| 1903 | TTCCACCGCAGCACAA |
| 1904 | ATTCCACCGCAGCACA |
| 1905 | ATGCTAATCCCTTAGG |
| 1906 | GTGACAATGCTAATCC |
| 1907 | GTCATGCCTACAGTGT |
| 1908 | TTATTAAGGGTCATGC |
| 1909 | TTAGATTAGCCTTGGG |
| 1910 | CTTAGATTAGCCTTGG |
| 1911 | GACTGCTATGACACTA |
| 1912 | GGACTGCTATGACACT |
| 1913 | TACTGAAACGGGATCT |
| 1914 | TTTACTGAAACGGGAT |
| 1915 | CATCAAGGTCAGTTGG |
| 1916 | GGGCATAACTCTTGGG |
| 1917 | CGAGAACTTCTATGAG |
| 1918 | CCGAGAACTTCTATGA |
| 1919 | CTTCAGGCTTAGTTAG |
| 1920 | GCCCTAGTCTTACCAG |
| 1921 | AGCCCTAGTCTTACCA |
| 1922 | ATAGCCCTAGTCTTAC |
| 1923 | TTTAATAGCCCTAGTC |
| 1924 | CTTTAATAGCCCTAGT |
| 1925 | TTCTGATTACAAGCGC |
| 1926 | ATTCTGATTACAAGCG |
| 1927 | CACTAACCAATAGCCC |
| 1928 | CCACTAACCAATAGCC |
| 1929 | TCAACCAACGAAATAG |
| 1930 | CTTGGGTTATCATACA |
| 1931 | ACTTGGGTTATCATAC |
| 1932 | CCATGCAGATTAGAGT |
| 1933 | TGGATTGAGAGGTTAC |
| 1934 | GTTGGATTGAGAGGTT |
| 1935 | GCTGAACAATCGAGTG |
| 1936 | AGCTGAACAATCGAGT |
| 1937 | TGAGCTGAACAATCGA |
| 1938 | GCTATGCTCTAGTTGC |
| 1939 | GCCTAGATGTGCCCAT |
| 1940 | TAGCCTAGATGTGCCC |
| 1941 | GTAGCCTAGATGTGCC |
| 1942 | CGTAGCCTAGATGTGC |
| 1943 | TCGTAGCCTAGATGTG |
| 1944 | CTGTCGTAGCCTAGAT |
| 1945 | CCTGTCGTAGCCTAGA |
| 1946 | TCCTGTCGTAGCCTAG |
| 1947 | TAGTGAGCATCTAAGG |
| 1948 | ACTAGTCTTTGTAGTG |
| 1949 | AGTCTCTACACTAGTC |
| 1950 | TAGCTTGGTCAGAGGG |
| 1951 | GTAGCTTGGTCAGAGG |
| 1952 | GGTAGCTTGGTCAGAG |
| 1953 | GGGTAGCTTGGTCAGA |
| 1954 | TATGGGTAGCTTGGTC |
| 1955 | CTATGGGTAGCTTGGT |
| 1956 | TTGTAACTTGGTGGAC |
| 1957 | CTTGTAACTTGGTGGA |
| 1958 | GCTTGTAACTTGGTGG |
| 1959 | AGCTTGTAACTTGGTG |
| 1960 | CAGCTTGTAACTTGGT |
| 1961 | GCTTTGATGGGTTGAC |
| 1962 | ACTTGTGAGTCCTGTC |
| 1963 | GTCTACTTGTGAGTCC |
| 1964 | GATTACTGAGTCCACC |
| 1965 | CCTAACCCAACTGTGC |
| 1966 | ACCTAACCCAACTGTG |
| 1967 | GAGTGACCCTGTTGAT |
| 1968 | CTCATTAACTCCCGAG |
| 1969 | CTTGGTTTGATGGCGC |
| 1970 | TCTTGGTTTGATGGCG |
| 1971 | GCCCTGTCACCAATAG |
| 1972 | GTCCTAAACCATGCTA |
| 1973 | CCTTACGCTTAATCAA |
| 1974 | TTATGATAGACGGGCA |
| 1975 | TTTATGATAGACGGGC |
| 1976 | GCATGTCCTATAACAG |
| 1977 | GTTCAGTAGGTCAGTC |
| 1978 | GGAAGTTCAGTAGGTC |
| 1979 | GGTCATGTAGAGTGCT |
| 1980 | TGGTCATGTAGAGTGC |
| 1981 | CTGGTCATGTAGAGTG |
| 1982 | GATCTGTTGCCACCCA |
| 1983 | GTGATCTGTTGCCACC |
| 1984 | TTAGTGGATGGTTGAT |
| 1985 | CTTAGTGGATGGTTGA |
| 1986 | CCTTAGTGGATGGTTG |
| 1987 | ACCTTAGTGGATGGTT |
| 1988 | TACCTTAGTGGATGGT |
| 1989 | TTACCTTAGTGGATGG |
| 1990 | TACATTCAGGTGGTCC |
| 1991 | GACTGATAGACCATAC |
| 1992 | TTGACTGATAGACCAT |
| 1993 | GATTGACTGATAGACC |
| 1994 | ACCTAGACTGATGTTA |
| 1995 | GCAACTGAGCTATCCT |
| 1996 | GGTCTATTGGTTAAGA |
| 1997 | AGCTTGTGTGGACCCT |
| 1998 | GACTTAATCCAACTGG |
| 1999 | GCTAACCATTATACAC |
| 2000 | AGCCCTTACTGCTAAC |
| 2001 | GAGCCCTTACTGCTAA |
| 2002 | AGAGCCCTTACTGCTA |
| 2003 | TGGTAGACAGGCAATC |
| 2004 | ATGTTTAGTCCAAGGC |
| 2005 | GTATGTTTAGTCCAAG |
| 2006 | GAGTATGTTTAGTCCA |
| 2007 | GGGAGTATGTTTAGTC |
| 2008 | GATTGGCTGTTACCTC |
| 2009 | AGGATTGGCTGTTACC |
| 2010 | CGCTGCCACAGGATTG |
| 2011 | TTGGTCCTGATAATCC |
| 2012 | CTTGGTCCTGATAATC |
| 2013 | GAACCCTACTGCTGAG |
| 2014 | GAGTAGCATTGGCAGT |
| 2015 | GCAATTGAGACACCTC |
| 2016 | GCAGCAGTCTAGGTTC |
| 2017 | GCCCATGTGAACAACC |
| 2018 | TCTAGCCCATGTGAAC |
| 2019 | GTATCGGGTGAGGTCT |
| 2020 | GTGATAGGCTCAACCT |
| 2021 | ATCTCAGCAGCCCGTG |
| 2022 | CTCAGCATTACACGGT |
| 2023 | ACTCAGCATTACACGG |
| 2024 | GACTCAGCATTACACG |
| 2025 | GGACTCAGCATTACAC |
| 2026 | GTAATCTGTACTCTAC |
| 2027 | GAGTAGAGCACTTAGC |
| 2028 | CTGCGTTACCATGAGT |
| 2029 | GCTGCGTTACCATGAG |
| 2030 | AGCTGCGTTACCATGA |
| 2031 | GCCCACGACCATTAGG |
| 2032 | GATTAGTAGGTCATGC |
| 2033 | GGATTAGTAGGTCATG |
| 2034 | AGGATTAGTAGGTCAT |
| 2035 | CAGGATTAGTAGGTCA |
| 2036 | ACAGGATTAGTAGGTC |
| 2037 | GGGTTGCACTTTACAG |
| 2038 | GCCCTATCGGAGTTGG |
| 2039 | AGGTAATTGATCCCAC |
| 2040 | CCAGGTAATTGATCCC |
| 2041 | TTCCGAAGTGGTAAGG |
| 2042 | TTTCCGAAGTGGTAAG |
| 2043 | GTTTCCGAAGTGGTAA |
| 2044 | TGTTTCCGAAGTGGTA |
| 2045 | GTGTTTCCGAAGTGGT |
| 2046 | GGTGTTTCCGAAGTGG |
| 2047 | GACTCATCATAACTAC |
| 2048 | GGACTCATCATAACTA |
| 2049 | CCTACAAGTGAGATCC |
| 2050 | GTCCTACAAGTGAGAT |
| 2051 | GGTCCTACAAGTGAGA |
| 2052 | TGGTCCTACAAGTGAG |
| 2053 | AGTGGGTCTTGTCAGC |
| 2054 | GAGTGGGTCTTGTCAG |
| 2055 | GTGCTGAATCACTATG |
| 2056 | AACCATATGCAGGATC |
| 2057 | CGGAATACAAGCAATC |
| 2058 | GGGTATGGGTTCAACA |
| 2059 | AGGGTATGGGTTCAAC |

[0116] In some instances, the modulator described herein comprises one or more sugar-modified nucleotide. In some specific instances, the sugar-modified nucleotide is a 2′-fluoro modified nucleotide. In some specific instances, the sugar-modified nucleotide is a 2′-alkoxy modified nucleotide (e.g., 2′-methoxy modified nucleotide). In some specific instances, the sugar-modified nucleotide is a 2′-amino modified nucleotide. In some specific instances, the sugar-modified nucleotide is a 2′-azido modified nucleotide.

[0117] In some instances, the modulator described herein comprises one or more backbone-modified nucleotide. In some specific instances, the modified backbone is a methylphosphonate.

[0118] In some specific instances, the modified backbone is phosphorothioate. In some specific instances, the modified backbone is a guanidinopropyl phosphoramidate. In some specific instances, the modified backbone is a mesyl-phosphoramidate (MsPA) linkages.

[0119] In some specific instances, the modified backbone is phosphorothioate, and the phosphorothioate is a stereochemically enriched phosphorothioate. In certain instances, the strand contains at least one stereochemically enriched phosphorothioate. In some instances, the strand comprises at least 1, 2, 3 stereochemically enriched phosphorothioates. In some instances, the strand comprises only 1, 2, 3, or 4 stereochemically enriched phosphorothioates.

[0120] In some instances, the modulator described herein comprises one or more purine modification. In some specific instances, the purine modification described herein is 2,6-diaminopurine. In some specific instances, the purine modification described herein is 3-deaza-adenine. In some specific instances, the purine modification described herein is 7-deaza-guanine. In some specific instances, the purine modification described herein is 8-azido-adenine.

[0121] In some instances, the modulator described herein comprises one or more pyrimidine modification. In some specific instances, the pyrimidine modification described herein is 2-thiothymidine. In some specific instances, the pyrimidine modification described herein is 5-carboxamide-uracil. In some specific instances, the pyrimidine modification described herein is 5-methyl-cytosine. In some specific instances, the pyrimidine modification described herein is 5-ethynyl uracil.

[0122] In some instances, the modulator described herein comprises an abasic substitution. In those cases where a hybridized polynucleotide construct is contemplated for use as siRNA, a reduction of miRNA-like off-target effects is desirable. The inclusion of one or more (e.g., one or two) abasic substitutions in the hybridized polynucleotide constructs may reduce or even eliminate miRNA-like off-target effects, as the abasic substitutions lack nucleobases that are capable of engaging in base-pairing interactions and alleviate steric hindrance. Thus, the modulator disclosed herein may include one or more (e.g., one or two) abasic substitutions. In specific instances, abasic substitution is at the 5th nucleotide from the 5′ end of the antisense strand described herein. The modulator described herein may contain a strand including a seed region including a hypoxanthine nucleobase-containing nucleoside (e.g., inosine).

[0123] In some instances, the modulator described herein comprises one or more type of modifications as described above. Accordingly, in some instances, about 10% of the nucleotides from the modulator described herein are modified with one or more type of modifications as described above. In other instances, about 20% of the nucleotides from the modulator described herein are modified with one or more type of modifications as described above. In other instances, about 30% of the nucleotides from the modulator described herein are modified with one or more type of modifications as described above. In other instances, about 40% of the nucleotides from the modulator described herein are modified with one or more type of modifications as described above. In other instances, about 50% of the nucleotides from the modulator described herein are modified with one or more type of modifications as described above. In other instances, about 60% of the nucleotides from the modulator described herein are modified with one or more type of modifications as described above. In other instances, about 70% of the nucleotides from the modulator described herein are modified with one or more type of modifications as described above. In other instances, about 80% of the nucleotides from the modulator described herein are modified with one or more type of modifications as described above. In other instances, about 90% of the nucleotides from the modulator described herein are modified with one or more type of modifications as described above. In other instances, 100% of the nucleotides from the modulator described herein are modified with one or more type of modifications as described above.

[0124] In some instances, the one or more types of modifications described herein occurs at different positions within the modulator described herein. In specific instances, the one or more types of modifications described herein occurs in the seed region within the modulator described herein. In specific instances, the one or more types of modifications described herein occurs at 3′ terminal of the modulator described herein. In specific instances, the one or more types of modifications described herein occurs at 5′ terminal of the modulator described herein. In specific instances, the one or more types of modifications described herein occurs dispersedly within the modulator described herein. In specific instances, the one or more types of modifications described herein occurs in clusters within the modulator described herein.

[0125] In some instances, the ASO is a gapmer comprising a central region of consecutive DNA nucleotides flanked by a 5′-wing region and 3′-wing region, wherein at least one of 5′-wing region and 3′-wing region comprises a nucleic acid analogue, wherein the nucleic acid analogue comprises one or more ribose modifications, one or more backbone modifications, one or more nucleobase modifications, or a combination thereof.

[0126] In some instances, the one or more ribose modifications disclosed herein include locked nucleic acid (LNA), tricyclo-DNA, 2′-fluoro, 2′-O-methyl, 2′-methoxyethyl (2′-MOE), 2′-cyclic ethyl (cET), unlocked nucleic acid (UNA), conformationally restricted nucleoside (CRN), or any combination thereof. In some instances, the one or more backbone modifications comprise phosphorothioate, methylphosphonate, guanidinopropyl phosphoramidate, or any combination thereof. In some instances, the one or more nucleobases comprise purine modifications (e.g., 2,6-diaminopurin, 3-deaza-adenine, 7-deaza-guanine, 8-zaido-adenine, or any combination thereof). In some instances, the one or more nucleobases comprise pyrimidine modifications (e.g., 2-thiothymidine, 5-carboxamide-uracil, 5-methyl-cytosine, 5-ethynyl-uracil, or any combination thereof).

[0127] In some instances, the nucleic acid analogue comprises an LNA. In some instances, the LNA comprises a beta-D-oxy LNA, an alpha-L-oxy-LNA, a beta-D-amino-LNA, an alpha-L-amino-LNA, a beta-D-thio-LNA, an alpha-L-thio-LNA, a 5′-methyl-LNA, a beta-D-ENA, or an alpha-L-ENA. In some instances, the LNA comprises a beta-D-oxy LNA. In some instances, the 5′-wing region comprises at least two LNAs. In some instances, the 5′-wing region comprises three consecutive LNAs. In some instances, the 3′-wing region comprises at least one LNA. In some instances, the 3′-wing region comprises two consecutive LNAs. In some instances, the nucleic acid molecule disclosed herein comprises one or more phosphorothioate internucleotide linkages. In some instances, each internucleotide linkage in the nucleic acid molecule is a phosphorothioate backbone.

[0128] In some instances, the modulator is a gapmer, and one or more assays are utilized to assess the efficiency of the gapmer. Accordingly, in some instances, the efficiency of the modulator is assessed by the expression (e.g., transcript expression) of the lncRNA disclosed herein. In some instances, the efficiency of the modulator is assessed by the features of the lncRNA disclosed herein. In some instances, the efficiency of the modulator is assessed by the binding of an RNA-binding protein to the lncRNA disclosed herein. In some instances, the efficiency of the modulator is assessed by the modification and/or functional features of the lncRNA disclosed herein. In some instances, the efficiency of the modulator is assessed by structural features of the lncRNA disclosed herein.

[0129] In some instances, the modulator is a mixmer, and one or more assays are utilized to assess the efficiency of the mixmer. Accordingly, in some instances, the efficiency of the modulator is assessed by the expression of the lncRNA disclosed herein. In some instances, the efficiency of the modulator is assessed by the features of the lncRNA disclosed herein. In some instances, the efficiency of the modulator is assessed by the binding of an RNA-binding protein to the lncRNA disclosed herein. In some instances, the efficiency of the modulator is assessed by the modification and/or functional features of the lncRNA disclosed herein. In some instances, the efficiency of the modulator is assessed by structural features of the lncRNA disclosed herein.

[0130] In some instances, the modulator is an siRNA which targets a cytoplasmic target, and one or more assays are utilized to assess the efficiency of the modulator. Accordingly, in some instances, the efficiency of the modulator is assessed by the expression of the lncRNA disclosed herein. In some instances, the efficiency of the modulator is assessed by the features of the lncRNA disclosed herein. In some instances, the efficiency of the modulator is assessed by the binding of an RNA-binding protein to the lncRNA disclosed herein. In some instances, the efficiency of the modulator is assessed by the modification and/or functional features of the lncRNA disclosed herein. In some instances, the efficiency of the modulator is assessed by structural features of the lncRNA disclosed herein.

[0131] In some instances, the modulator disclosed herein suppresses CAF activities, which may include, but not limited to involvement in regulating ECM structure organization and/or GTPase activity. In some instances, the modulator disclosed herein modulates extracellular matrix organization. In some instances, the modulator disclosed herein modulates extracellular structure organization. In some instances, the modulator disclosed herein modulates external encapsulating structure organization. In some instances, the modulator disclosed herein modulates the expression and/or components of ECM. Non-limiting examples of components of ECM include collagen, elastin, reticulin, associated-microfibrils, fibronectin, laminin, proteoglycan, proteoglycan polymer, glycoconjugate, glycosaminoglycan, or variants thereof. In some instances, the modulator disclosed herein modulates GTPase activity. In some instances, the modulator disclosed herein modulates activation of GTPase activity. Non-limiting examples of GTPase activity include signal transduction in response to activation of cell surface markers (e.g., transmembrane receptors), protein biosynthesis, regulation of cell differentiation, regulation of cell proliferation, regulation of cell division, regulation of cell movement, translocation of proteins, transportation of vesicles within cell or variations thereof. In some instances, the modulator disclosed herein modulates GTPase expression. In some instances, the modulator disclosed herein modulates GTP expression. In some instances, the modulator disclosed herein modulates the ability of GTPase to bind to GTP. In some instances, the modulator disclosed herein regulates genes involved in ECM structure organization, and/or GTPase activity. In some instances, the modulator disclosed herein reduces expression or activity of genes involved in ECM structure organization, and/or GTPase activity. In some instances, the modulator disclosed herein suppresses phenotype development of CAF. In some instances, the modulator disclosed herein induces or facilitates transition of CAFs to fibroblasts. In some instances, the modulator disclosed herein induces or facilitates transition of myCAFs to fibroblasts. In some instances, the modulator disclosed herein suppresses the transition of fibroblasts to CAFs. In some instances, the modulator disclosed herein reverses the transition of fibroblasts to CAFs. In some instances, the modulator disclosed herein suppress metastasis formation and/or drug resistance. In some instances, the modulator disclosed herein reduces expression or activity of one or more markers of myCAFs. In some instances, the modulator disclosed herein reduces expression or activity of one or more genes in listed in Table 1 or Table 13 in CAFs compared to a CAFs without modulator. In some instances, the modulator disclosed herein suppresses expression of one or more genes listed in Table 1 or Table 13 in CAFs with an activated TGFβ pathway compared to CAFs without modulator. In some instances, the modulator disclosed herein suppresses expression of one or more genes listed in Table 1 or Table 13 in HDFs treated with TGFβ with or without starvation compared to HDFs without modulator. In some instances, the modulator disclosed herein reduces expression or activity of one or more ECM-modulatory gene in CAFs when compared to a CAFs without modulator. Non-limiting examples of ECM-modulatory genes are LRRC15 (NM 001135057), MMP11 (NM_005940), COL11A1 (NM 080629), C1QTNF3 (NM 030945), CTHRC1 (NM_138455), COL12A1 (NM 004370), COL10A1 (NM 00493), COL5A2 (NM_000393), THBS2 (NM 003247), AEBP1 (NM_001129), ITGA11 (NM_001004439), PDPN (NM 006474), FAP (NM 004460), COL8A1 (NM_001850), COL1A1 (NM_000088), COL1A2 (NM 000089), FN1 (NM 212482), or POSTN (NM_006475). In some instances, higher expression of ECM-modulatory gene expression is associated with poor response to checkpoint blockade treatment, standard-of-care chemotherapy treatments of cancers, or a combination thereof. In some instances, higher expression of ECM-modulatory gene expression is associated with poor response to checkpoint blockade treatment of cancers. In some instances, the RNA expression level of a marker of myCAF is at least about 10%, at least about 20%, at least about 30%, at least about 40%, at least about 50%, at least about 60%, at least about 70, at least about 80%, or at least about 90% lower than in a myCAF with a modulator disclosed herein compared to a myCAF without a modulator. In some instances, the RNA expression level of a marker of myCAF is at least about 1.5 folds, at least about 2 folds, at least about 3 folds, at least about 4 folds, at least about 5 folds, at least about 6 folds, at least about 7 folds, at least about 8 folds, at least about 9 folds, or at least about 10 folds lower in a myCAF with a modulator disclosed herein compared to a myCAF without a modulator.

### Pharmaceutical Compositions

[0132] Further provided herein are pharmaceutical compositions comprising the modulator disclosed herein and a pharmaceutically acceptable salt, excipient, or derivative thereof.

[0133] The suitable pharmaceutically acceptable salts or derivative thereof include but are not limited to (i) salts formed with cations such as sodium, potassium, ammonium, magnesium, calcium, polyamines such as spermine and spermidine, etc.; (ii) acid addition salts formed with inorganic acids, for example hydrochloric acid, hydrobromic acid, sulfuric acid, phosphoric acid, and the like; and (iii) salts formed with organic acids such as, for example, acetic acid, oxalic acid, tartaric acid, succinic acid, maleic acid, fumaric acid, gluconic acid, citric acid, malic acid, ascorbic acid, benzoic acid, tannic acid, palmitic acid, alginic acid, polyglutamic acid, naphthalenesulfonic acid, methanesulfonic acid, p-toluenesulfonic acid, naphthalenedisulfonic acid, polygalacturonic acid, and the like.

[0134] A pharmaceutical composition described herein can be prepared to include the modulator disclosed herein, into a form suitable for administration to a subject using carriers, excipients, and vehicles. In some instances, excipients include magnesium carbonate, titanium dioxide, lactose, mannitol and other sugars, talc, milk protein, gelatin, starch, vitamins, cellulose and its derivatives, animal and vegetable oils, polyethylene glycols and solvents, such as sterile water, alcohols, glycerol, and polyhydric alcohols. Intravenous vehicles include fluid and nutrient replenishers. Preservatives include antimicrobial, anti-oxidants, chelating agents, and inert gases.

[0135] Other pharmaceutically acceptable vehicles include aqueous solutions, non-toxic excipients, including salts, preservatives, buffers and the like, as described, for instance, in Remington: The Science and Practice of Pharmacy, 21st Ed., Gennaro, Ed., Lippencott Williams & Wilkins (2005), and The United States Pharmacopeia: The National Formulary (USP 36 NF31), published in 2013. The pH and exact concentration of the various components of the pharmaceutical composition are adjusted according to routine skills in the art. See Goodman and Gilman's, The Pharmacological Basis for Therapeutics.

[0136] The pharmaceutical compositions described herein may be administered in combination with one or more therapeutic agents. The pharmaceutical compositions described herein may be administered in combination with one or more therapeutic agents that mediates tumor fibrosis.

[0137] The pharmaceutical compositions described herein may be administered in combination with one or more anti-cancer drug. The pharmaceutical compositions described herein may be administered in combination with one or more anti-tumor drug.

[0138] The pharmaceutical compositions described herein may be administered locally or systemically. The therapeutically effective amounts will vary according to factors, such as the degree of infection in a subject, the age, sex, health conditions, and weight of the individual.

[0139] Dosage regimes can be adjusted to provide the optimum therapeutic response. For example, several divided doses can be administered daily or the dose can be proportionally reduced as indicated by the exigencies of the therapeutic situation.

[0140] The pharmaceutical composition can be administered in a convenient manner, such as by injection (e.g., subcutaneous, intravenous, intraorbital, and the like), oral administration, ophthalmic application, inhalation, topical application, or rectal administration. Depending on the route of administration, the pharmaceutical composition can be coated with a material to protect the pharmaceutical composition from the action of enzymes, acids, and other natural conditions that may inactivate the pharmaceutical composition. The pharmaceutical composition can also be administered parenterally or intraperitoneally. Dispersions can also be prepared in glycerol, liquid polyethylene glycols, and mixtures thereof, and in oils. Under ordinary conditions of storage and use, these preparations may contain a preservative to prevent the growth of microorganisms.

[0141] Pharmaceutical compositions suitable for injectable use include sterile aqueous solutions (where water soluble) or dispersions and sterile powders for the extemporaneous preparation of sterile injectable solutions or dispersions. The composition can be sterile and fluid to the extent that easy syringability exists. The composition can be stable under the conditions of manufacture and storage and preserved against the contaminating action of microorganisms, such as bacteria and fungi. The vehicle can be a solvent or dispersion medium containing, for example, water, ethanol, polyol (for example, glycerol, propylene glycol, and liquid polyethylene glycol, and the like), suitable mixtures thereof, and vegetable oils. The proper fluidity can be maintained, for example, by the use of a coating, such as lecithin, by the maintenance of certain particle size, in the case of dispersion, and by the use of surfactants. Prevention of the action of microorganisms can be achieved by various antibacterial and antifungal agents, for example, parabens, chlorobutanol, phenol, ascorbic acid, thimerosal, and the like. In many cases, isotonic agents, for example, sugars, polyalcohols, such as mannitol, sorbitol, or sodium chloride are used in the composition. Prolonged absorption of the injectable compositions can be brought about by including in the composition an agent that delays absorption, for example, aluminum monostearate and gelatin.

[0142] Sterile injectable solutions can be prepared by incorporating the pharmaceutical composition in an appropriate solvent with one or a combination of ingredients enumerated above followed by filtered sterilization. Generally, dispersions are prepared by incorporating the pharmaceutical composition into a sterile vehicle that contains a basic dispersion medium and the other ingredients from those enumerated above.

[0143] It is advantageous to formulate parenteral compositions in dosage unit form for ease of administration and uniformity of dosage. Dosage unit form as used herein, refers to physically discrete units suited as unitary dosages for the subject to be treated; each unit containing a predetermined quantity of pharmaceutical composition is calculated to produce the desired therapeutic effect in association with the pharmaceutical vehicle. The specification for the dosage unit forms are related to the characteristics of the pharmaceutical composition and the particular therapeutic effect to be achieve. The principal pharmaceutical composition is compounded for convenient and effective administration in effective amounts with a suitable pharmaceutically acceptable vehicle in an acceptable dosage unit. In the case of compositions containing supplementary active ingredients, the dosages are determined by reference to the usual dose and manner of administration of the ingredients.

[0144] The pharmaceutical composition can be orally administered, for example, in a carrier, e.g., in an enteric-coated unit dosage form. The pharmaceutical composition and other ingredients can also be enclosed in a hard or soft-shell gelatin capsule or compressed into tablets. For oral therapeutic administration, the pharmaceutical composition can be incorporated with excipients and used in the form of ingestible tablets, troches, capsules, pills, wafers, and the like. Such compositions and preparations may contain at least 1% by weight of active compound. The percentage of the compositions and preparations can, of course, be varied and can conveniently be between about 5% to about 80% of the weight of the unit. The tablets, troches, pills, capsules, and the like can also contain the following: a binder, such as gum tragacanth, acacia, corn starch, or gelatin; excipients such as dicalcium phosphate; a disintegrating agent, such as corn starch, potato starch, alginic acid, and the like; a lubricant, such as magnesium stearate; and a sweetening agent, such as sucrose, lactose or saccharin, or a flavoring agent such as peppermint, oil of wintergreen, or cherry flavoring. When the dosage unit form is a capsule, it can contain, in addition to materials of the above type, a liquid carrier. Various other materials can be present as coatings or to otherwise modify the physical form of the dosage unit. For instance, tablets, pills, or capsules can be coated with shellac, sugar, or both. A syrup or elixir can contain the agent, sucrose as a sweetening agent, methyl and propylparabens as preservatives, a dye, and flavoring, such as cherry or orange flavor. Any material used in preparing any dosage unit form can be of pharmaceutically acceptable purity and substantially non-toxic in the amounts employed. In addition, the pharmaceutical composition can be incorporated into sustained-release preparations and formulations.

[0145] The pharmaceutical composition described herein may comprise one or more permeation enhancer that facilitates bioavailability of the modulator described herein. WO 2000/67798, Muranishi, 1990, Crit. Rev. Ther. Drug Carrier Systems, 7, 1, Lee et al., 1991, Crit. Rev. Ther. Drug Carrier Systems, 8, 91 are herein incorporated by reference in its entirety. In some aspects, the permeation enhancer is intestinal. In some aspects, the permeation enhancer is transdermal. In some aspects, the permeation enhancer is to facilitate crossing the brain-blood barrier. In some aspects, the permeation enhancer improves the permeability in the oral, nasal, buccal, pulmonary, vaginal, or corneal delivery model. In some aspects, the permeation enhancer is a fatty acid or a derivative thereof. In some aspects, the permeation enhancer is a surfactant or a derivative thereof. In some aspects, the permeation enhancer is a bile salt or a derivative thereof. In some aspects, the permeation enhancer is a chelating agent or a derivative thereof. In some aspects, the permeation enhancer is a non-chelating non-surfactant or a derivative thereof. In some aspects, the permeation enhancer is an ester or a derivative thereof. In some aspects, the permeation enhancer is an ether or a derivative thereof. In some specific aspects, the permeation enhancer is arachidonic acid, undecanoic acid, oleic acid, lauric acid, caprylic acid, capric acid, myristic acid, palmitic acid, stearic acid, linoleic acid, linolenic acid, dicaprate, tricaprate, monoolein, dilaurin, glyceryl 1-monocaprate, 1-dodecylazacycloheptan-2-one, an acylcarnitine, an acylcholine, or a monoglyceride, a diglyceride or a pharmaceutically acceptable salt thereof. In one aspect, the permeation enhancer is sodium caprate (C10). In some instances, the permeation enhancer is chenodeoxycholic acid (CDCA), ursodeoxychenodeoxycholic acid (UDCA), cholic acid, dehydrocholic acid, deoxycholic acid, glucholic acid, glycholic acid, glycodeoxycholic acid, taurocholic acid taurodeoxycholic acid, sodium tauro-24,25-dihydro-fusidate or sodium glycodihydrofusidate. In some instances, the permeation enhancer is polyoxyethylene-9-lauryl ether, or polyoxyethylene-20-cetyl ether.

[0146] Further provided herein are kits comprising the modulator disclosed herein. Further provided herein are kits comprising the pharmaceutical composition disclosed herein. In some aspects, the kit comprises suitable instructions in order to perform the methods of the kit. The instructions may provide information of performing any of the methods disclosed herein, whether or not the methods may be performed using only the reagents provided in the kit.

[0147] For use in the therapeutic applications described herein, kits and articles of manufacture are also described herein. In some aspects, such kits include a carrier, package, or container that is compartmentalized to receive one or more containers such as vials, tubes, and the like, each of the container(s) including one of the separate elements to be used in a method described herein. Suitable containers include, for example, bottles, vials, syringes, and test tubes. The containers can be formed from a variety of materials such as glass or plastic. The articles of manufacture provided herein contain packaging materials. Examples of pharmaceutical packaging materials include, but are not limited to, blister packs, bottles, tubes, inhalers, pumps, bags, vials, containers, syringes, bottles, and any packaging material suitable for a selected formulation and intended mode of administration and treatment. The container(s) optionally have a sterile access port (for example the container is an intravenous solution bag or a vial having a stopper pierceable by a hypodermic injection needle). Such kits optionally comprise a composition with an identifying description or label or instructions relating to its use in the methods described herein.

[0148] A kit may include one or more additional containers, each with one or more of various materials (such as reagents, optionally in concentrated form, and/or devices) desirable from a commercial and user standpoint for use of the modulator described herein. Non-limiting examples of such materials include, but not limited to, buffers, diluents, filters, needles, syringes, carrier, package, container, vial and/or tube labels listing contents and/or instructions for use, and package inserts with instructions for use. In some instances, a set of instructions is included.

[0149] In some aspects, a label is on or associated with the container. A label can be on a container when letters, numbers or other characters forming the label are attached, molded or etched into the container itself; a label can be associated with a container when it is present within a receptacle or carrier that also holds the container, e.g., as a package insert. A label can be used to indicate that the contents are to be used for a specific therapeutic application. The label can also indicate directions for use of the contents, such as in the methods described herein.

[0150] In certain aspects, a pharmaceutical composition comprising the modulators provided herein and optional additional active agent is presented in a pack or dispenser device which can contain one or more unit dosage forms. The pack can for example contain metal or plastic foil, such as a blister pack. The pack or dispenser device can be accompanied by instructions for administration. The pack or dispenser can also be accompanied with a notice associated with the container in form prescribed by a governmental agency regulating the manufacture, use, or sale of pharmaceuticals, which notice is reflective of approval by the agency of the form of the drug for human or veterinary administration. Such notice, for example, can be the labeling approved by the U.S. Food and Drug Administration for prescription drugs, or the approved product insert.

[0151] Compositions containing the modulators described herein formulated in a compatible pharmaceutical carrier can also be prepared, placed in an appropriate container, and labeled for treatment of an indicated condition.

### Methods

[0152] As disclosed herein, certain gene/transcription factor may be a reliable cancer-related biomarker (e.g., LRRC15, see FIG. 20I), but such gene/transcription factor may be less potent a therapeutic target to design TME/myCAF-related modulators against compared to other more promising targets (e.g., see FIG. 9H-9G, 9P). In contrast, strong evidence as disclosed herein (e.g., FIGS. 4A-4I, 6A-6I, 6K, 9E-9G, 9S, 11A-11I, 13A-13I, 13K, 14D-14J, 14L-14R, 15E-15J, 15L-15Q, and 17A-17H) support the notion that the lncRNA as disclosed herein serves as a promising therapeutic target to design TME/myCAF-related modulators against.

[0153] Accordingly, further provided herein are methods of inhibiting a growth of a solid tumor or facilitating access to a solid tumor in a subject in need thereof, the method comprising administering to the subject an effective amount of the modulator described herein or the pharmaceutical composition described herein. In some instances, the method disclosed herein directly inhibits a growth of a solid tumor. In some instances, the method disclosed herein directly facilitates access to a solid tumor. In some instances, the method disclosed herein reduces desmoplasia or fibrous tissue around tumor cells. In some instances, the method disclosed herein indirectly inhibits a growth of a solid tumor. In some instances, the method disclosed herein indirectly facilitates access to a solid tumor. In some instances, the method disclosed herein does not per se affect primary tumor growth. In some instances, the method disclosed herein inhibits the metastasis of a tumor. In some instances, the method disclosed herein improves the therapeutic outcome of an anti-tumor therapy by reducing the tumor's drug resistance. In some instances, the method disclosed herein interferes stage 0 of a tumor progression which is a pre-cancerous stage. In some instances, the method disclosed herein interferes stage I of a tumor progression when the tumor is localized to a small area and has not spread to lymph nodes or other tissues. In some instances, the method disclosed herein interferes stage II of a tumor progression when the tumor has grown without spreading. In some instances, the method disclosed herein interferes stage III of a tumor progression when the tumor has grown larger and has possibly spread to lymph nodes or other tissues. In some instances, the method disclosed herein interferes stage IV of a tumor progression when the tumor has spread to lymph nodes or other tissues. In some instances, solid tumor in subject is from a subject with cancer. Non-limiting examples of cancers are breast cancer, colorectum cancer, lung cancer, prostate cancer, bladder cancer, head and neck cancer, skin cancer (e.g., skin melanoma), pancreatic cancer, liver cancer, esophageal cancer, brain cancer, stomach cancer, gallbladder cancer, or ovarian cancer. In some aspects, the solid tumor is breast cancer, colorectum cancer, lung cancer, prostate cancer, bladder cancer, head and neck cancer (e.g., head and neck squamous cell carcinoma), skin cancer (e.g., skin melanoma), pancreatic cancer (e.g., pancreatic ductal adenocarcinoma), liver cancer, esophageal cancer, brain cancer, stomach cancer (e.g., stomach adenocarcinoma), gallbladder cancer, ovarian cancer, colon adenocarcinoma, or sarcoma.

[0154] Provided herein are methods of reducing expression or activity of the lncRNA disclosed herein in a subject in need thereof, the method comprising administering to the subject the modulator disclosed herein, or a pharmaceutical composition disclosed herein. Further provided herein are methods of preventing, alleviating, or treating cancer (e.g., head and neck squamous carcinoma, pancreatic cancer) or a symptom associated with cancer in a subject in need thereof, the method comprising administering to the subject an effective amount of the modulator disclosed herein or the pharmaceutical composition provided herein.

[0155] In some instances, the modulator disclosed herein or the pharmaceutical composition described herein reduces expression or activity of genes involved in ECM structure organization and/or regulation of GTPase activity in a subject. In some instances, the modulator disclosed herein or the pharmaceutical composition described herein reduces expression or activity of one or more myCAF markers in cell of a subject. In some instances, the modulator disclosed herein or the pharmaceutical composition described herein reduces expression or activity of genes that differentially express in myCAF rather than in a fibroblast that is not associated with cancer. In some instances, the modulator disclosed herein or the pharmaceutical composition described herein reduces expression or activity of genes with higher expression in myCAF than in fibroblasts that is not associated with cancer. In some instances, the modulator disclosed herein or the pharmaceutical composition described herein increases expression or activity of genes with lower expression in myCAF than in fibroblasts that is not associated with cancer. In some instances, the modulator disclosed herein or the pharmaceutical composition described herein reduces expression or activity of genes with higher expression in myCAF than in other sub-population of CAFs. In some instances, the modulator disclosed herein or the pharmaceutical composition described herein increases expression or activity of genes with lower expression in myCAF than in other sub-population of CAFs. In some instances, the modulator disclosed herein or the pharmaceutical composition described herein reduces expression or activity of genes listed in Table 1 or Table 13. In some instances, the modulator disclosed herein or the pharmaceutical composition described herein reduces expression or activity of an ECM-modulatory gene. In some instances, the modulator described herein or the pharmaceutical composition disclosed herein reduces expression or activity of one or more ECM-modulatory genes in cell or tissue of a subject. Non-limiting examples of ECM-modulatory genes are LRRC15 (NM_001135057), MMP11 (NM_005940), COL11A1 (NM_080629), C1QTNF3 (NM_030945), CTHRC1 (NM_138455), COL12A1 (NM 004370), COL10A1 (NM 00493), COL5A2 (NM_000393), THBS2 (NM_003247), AEBP1 (NM_001129), ITGA11 (NM 001004439), PDPN (NM 006474), FAP (NM_004460), COL8A1 (NM_001850), COL1A1 (NM_000088), COL1A2 (NM 000089), FN1 (NM_212482), POSTN (NM_006475), or variations thereof.

[0156] In some instances, the modulator described herein or the pharmaceutical composition described herein restores an expression or activity of at least one or more genes (e.g., myCAF markers, ECM-modulatory genes) to a level comparable to a healthy cell. In some instances, the modulator described herein or the pharmaceutical composition described herein restores an expression or activity of at least one or more genes (e.g., myCAF markers, ECM-modulatory genes) by at least about 20%, at least about 30%, at least about 40%, at least about 50%, at least about 60%, at least about 70%, at least about 80%, or at least about 90% comparable to a healthy cell.

[0157] In some instances, the modulator described herein or the pharmaceutical composition described herein is encapsulated in a liposome or coupled with a nanoparticle. In some instances, the modulator described herein or the pharmaceutical composition described herein is encoded by a transgene in an expression vector. In some instances, the modulator or the synthetic polynucleic acid described herein is encapsulated in an extracellular vesicle.

[0158] In some instances, the modulator or the pharmaceutical composition comprising the modulator is administered systemically. In some instances, the modulator or the pharmaceutical composition comprising the modulator is administered locally. In some instances, the modulator or the pharmaceutical composition comprising the modulator is administered intratracheally, orally, nasally, intravenously, intraperitoneally, or intramuscularly. In some instances, the modulator or the pharmaceutical composition comprising the modulator is administered via a targeted delivery to a tumor tissue (e.g., head and neck squamous carcinoma) of the subject.

[0159] For delivery to the target cell or tissue (e.g., head and neck squamous carcinoma), the modulator described herein can non-covalently bind an excipient to form a complex. The excipient can be used to alter biodistribution after delivery, to enhance uptake, to increase half-life or stability of the strands in the modulator described herein (e.g., improve nuclease resistance), and/or to increase targeting to a particular cell or tissue type. Exemplary excipients include but are not limited to a condensing agent (e.g., an agent capable of attracting or binding a nucleic acid through ionic or electrostatic interactions); a fusogenic agent (e.g., an agent capable of fusing and/or being transported through a cell membrane); a protein to target a particular cell or tissue type (e.g., thyrotropin, melanotropin, lectin, glycoprotein, surfactant protein A, or any other protein); a lipid; a lipopolysaccharide; a lipid micelle or a liposome (e.g., formed from phospholipids, such as phosphotidylcholine, fatty acids, glycolipids, ceramides, glycerides, cholesterols, or any combination thereof); a nanoparticle (e.g., silica, lipid, carbohydrate, or other pharmaceutically-acceptable polymer nanoparticle); a polyplex formed from cationic polymers and an anionic agent (e.g., a CRO), where exemplary cationic polymers include but are not limited to polyamines (e.g., polylysine, polyarginine, polyamidoamine, and polyethylene imine); cholesterol; a dendrimer (e.g., a polyamidoamine (PAMAM) dendrimer); a serum protein (e.g., human serum albumin (HSA) or low-density lipoprotein (LDL)); a carbohydrate (e.g., dextran, pullulan, chitin, chitosan, inulin, cyclodextrin, or hyaluronic acid); a lipid; a synthetic polymer, (e.g., polylysine (PLL), polyethylenimine, poly-L-aspartic acid, poly-L-glutamic acid, styrene-maleic acid anhydride copolymer, poly(L-lactide-co-glycolic) copolymer, divinyl ether-maleic anhydride copolymer, N-(2-hydroxypropyl)methacrylamide copolymer (HMPA), polyethylene glycol (PEG), polyvinyl alcohol (PVA), polyurethane, poly(2-ethylacrylic acid), N-isopropylacrylamide polymer, pseudopeptide-polyamine, peptidomimetic polyamine, or polyamine); a cationic moiety (e.g., cationic lipid, cationic porphyrin, quaternary salt of a polyamine, or alpha helical peptide); a multivalent sugar (e.g., multivalent lactose, multivalent galactose, N-acetyl-galactosamine, N-acetyl-glucosamine, multivalent mannose, or multivalent fucose); a vitamin (e.g., vitamin A, vitamin E, vitamin K, vitamin B, folic acid, vitamin B12, riboflavin, biotin, or pyridoxal); a cofactor; or a drug to disrupt cellular cytoskeleton to increase uptake (e.g., taxol, vincristine, vinblastine, cytochalasin, nocodazole, japlakinolide, latrunculin A, phalloidin, swinholide A, indanocine, or myoservin).

[0160] In some aspects, administration of the modulator or the pharmaceutical composition comprising the modulator is a targeted delivery to a tumor of the subject. In some instances, the targeted delivery is via a local application. In some instances, the targeted delivery is via conjugation or coupling of the modulator to one or more specific targeting or binding moieties that target the tumor (e.g., tumor cell, a cell in the tumor microenvironment, specific extracellular matrix in the tumor microenvironment, etc.).

[0161] Further provided herein are methods of diagnosing or monitoring a cancer or a cancer development in a subject, the method comprising: (a) obtaining a sample from the subject; (b) detecting an expression and/or an activity of a biomarker from the sample, wherein the biomarker comprises an lncRNA described herein (e.g., an lncRNA transcribed from a genomic region or a subset thereof listed in Table 10 or Table 12, an lncRNA comprising a sequence or a fragment thereof listed in Table 11, an lncRNA sharing at least 80%, 85%, 90% or 95% sequence homology with a full-length sequence listed in Table 11, or an lncRNA sharing at least 80%, 85%, 90% or 95% sequence homology with a fragment of a sequence listed in Table 11); and (c) diagnosing the subject with cancer or to have a high/higher chance to contract cancer if the expression and/or the activity of the biomarker is at least 50%, at least 60%, at least 70%, at least 80%, or at least 90% higher when compared to a control. In some aspects, the detecting comprises using S1 nuclease protection assay, microarray analysis, polymerase chain reaction (PCR), hybridization technologies, reverse transcriptase polymerase chain reaction (RT-PCR), Northern blot, serial analysis of gene expression (SAGE), immunoassay, and/or mass spectrometry. In some aspects, the detecting comprises any sequencing-based methods that include but are not limited to bulk RNA sequencing, single cell or single nucleus RNA sequencing, DNA sequencing, DNA methylation profiling (e.g., for example, average % methylated CpG along the lncRNA locus described herein or the methylation status of specific CpGs within the lncRNA locus described herein), sc- or snATAC-seq or bulk ATAC-seq, DNase I assay for accessibility, CUT&RUN or ChIP-seq for specific histone marks (e.g., H3K27ac, H4K16ac, H3K9me3, H3K27me3, H3K4me1, H3K4me3, etc.). In some aspects, the biomarker further comprise INHBA, COL11A1, MMP13, NNMT, LOXL3, PLOD2, TNC, ITGA11, COL5A1, COMP, COL1A1, FN1, LTBP2, COL10A1, NOX4, POSTN, CCN2, LRRC15, DCN, LUM, COL1A2, COL3A1, COL6A2, MMP11, COL11A1, C1QTNF3, CTHRC1, COL12A1, COL10A1, COL5A2, THBS2, AEBP1, ITGA11, PDPN, FAP, COL8A1, or a gene from Table 1, Table 13, or Table 14. In some aspects, the detecting comprises detecting the activity and/or expression of transcription factors TEAD2, RUNX1, RUNX2, NFATC4. In some aspects, the method further comprises (d) administering the subject the modulator described herein, or the pharmaceutical composition described herein. In some aspects, the cancer is a solid tumor. In some aspects, the solid tumor is breast cancer, colorectum cancer, lung cancer, prostate cancer, bladder cancer, head and neck cancer (e.g., head and neck squamous cell carcinoma), skin cancer (e.g., skin melanoma), pancreatic cancer (e.g., pancreatic ductal adenocarcinoma), liver cancer, esophageal cancer, brain cancer, stomach cancer (e.g., stomach adenocarcinoma), gallbladder cancer, ovarian cancer, colon adenocarcinoma, or sarcoma. In some instances, the sample is a tumor fibroblast sample.

[0162] Further provided herein are methods of diagnosing or monitoring a cancer or a cancer development in a subject, the method comprising: (a) obtaining a sample from the subject; (b) detecting an expression and/or an activity of a biomarker from the sample, wherein the biomarker comprises INHBA, COL11A1, MMP13, NNMT, LOXL3, PLOD2, TNC, ITGA11, COL5A1, COMP, COL1A1, FN1, LTBP2, COL10A1, NOX4, POSTN, CCN2, LRRC15, DCN, LUM, COL1A2, COL3A1, COL6A2, MMP11, COL11A1, C1QTNF3, CTHRC1, COL12A1, COL10A1, COL5A2, THBS2, AEBP1, ITGAI1, PDPN, FAP, COL8A1, TEAD2, RUNX1, RUNX2, NFATC4, or a gene from Table 1, Table 13, or Table 14, or a combination thereof; and (c) diagnosing the subject with cancer or to have a high/higher chance to contract cancer if the expression and/or the activity of the biomarker is at least 50%, at least 60%, at least 70%, at least 80%, or at least 90% higher when compared to a control. In some aspects, the detecting comprises using SI nuclease protection assay, microarray analysis, polymerase chain reaction (PCR), hybridization technologies, reverse transcriptase polymerase chain reaction (RT-PCR), Northern blot, serial analysis of gene expression (SAGE), immunoassay, and/or mass spectrometry. In some aspects, the detecting comprises any sequencing-based methods that include but are not limited to bulk RNA sequencing, single cell or single nucleus RNA sequencing, DNA sequencing, DNA methylation profiling (e.g., for example, average % methylated CpG along the lncRNA locus described herein or the methylation status of specific CpGs within the InRNA locus described herein), sc- or snATAC-seq or bulk ATAC-seq, DNase I assay for accessibility, CUT&RUN or ChIP-seq for specific histone marks (e.g., H3K27ac, H4K16ac, H3K9me3, H3K27me3, H3K4me1, H3K4me3, etc.). In some aspects, the method further comprises (d) administering the subject the modulator described herein, or the pharmaceutical composition described herein. In some aspects, the cancer is a solid tumor. In some aspects, the solid tumor is breast cancer, colorectum cancer, lung cancer, prostate cancer, bladder cancer, head and neck cancer (e.g., head and neck squamous cell carcinoma), skin cancer (e.g., skin melanoma), pancreatic cancer (e.g., pancreatic ductal adenocarcinoma), liver cancer, esophageal cancer, brain cancer, stomach cancer (e.g., stomach adenocarcinoma), gallbladder cancer, ovarian cancer, colon adenocarcinoma, or sarcoma. In some instances, the sample is a tumor fibroblast sample.

[0163] Further provided herein are methods of diagnosing or monitoring a cancer or a cancer development in a subject, the method comprising: (a) obtaining a tumor fibroblast sample from the subject; (b) counting a number of fibroblasts that exhibit a higher expression of a biomarker, wherein the biomarker comprises a biomarker from the sample, wherein the biomarker comprises an lncRNA described herein (e.g., (e.g., an lncRNA transcribed from a genomic region or a subset thereof listed in Table 10 or Table 12, an lncRNA comprising a sequence or a fragment thereof listed in Table 11, an lncRNA sharing at least 80%, 85%, 90% or 95% sequence homology with a full-length sequence listed in Table 11, or an lncRNA sharing at least 80%, 85%, 90% or 95% sequence homology with a fragment of a sequence listed in Table 11); and (c) diagnosing the subject with cancer or to have a high/higher chance to contract cancer if the number of fibroblasts that exhibit a higher expression of the biomarker is higher than the number in a control. In some aspects, the counting in (b) is performed by fluorescence-activated cell sorting (FACS), single cell or single nucleus RNA sequencing combined with cell sorting. In some aspects, the biomarker further comprise INHBA, COL11A1, MMP13, NNMT, LOXL3, PLOD2, TNC, ITGA11, COL5A1, COMP, COL1A1, FN1, LTBP2, COL10A1, NOX4, POSTN, CCN2, LRRC15, DCN, LUM, COL1A2, COL3A1, COL6A2, MMP11, COL11A1, C1QTNF3, CTHRC1, COL12A1, COL10A1, COL5A2, THBS2, AEBP1, ITGA11, PDPN, FAP, COL8A1, or a gene from Table 1, Table 13, or Table 14. In some aspects, the detecting comprises detecting the activity and/or expression of transcription factors TEAD2, RUNX1, RUNX2, NFATC4. In some aspects, the method further comprises (d) administering the subject the modulator described herein, or the pharmaceutical composition described herein. In some aspects, the cancer is a solid tumor. In some aspects, the solid tumor is breast cancer, colorectum cancer, lung cancer, prostate cancer, bladder cancer, head and neck cancer (e.g., head and neck squamous cell carcinoma), skin cancer (e.g., skin melanoma), pancreatic cancer (e.g., pancreatic ductal adenocarcinoma), liver cancer, esophageal cancer, brain cancer, stomach cancer (e.g., stomach adenocarcinoma), gallbladder cancer, ovarian cancer, colon adenocarcinoma, or sarcoma.

[0164] As disclosed herein, the lncRNA disclosed herein is associated with poor overall patient survival by promoting tumor progression, cancer cell migration and metastasis, resistance to standard-of-care treatments, immune suppression as well as immunotherapy (PD-L1/PD-1 pathway blockade) failure. Accordingly, further provided herein are methods of predicting severity and progression/metastasis of a cancer in a subject, the method comprising: (a) obtaining a sample from the subject; (b) detecting an expression and/or an activity of a biomarker from the sample, wherein the biomarker comprises a biomarker from the sample, wherein the biomarker comprises an lncRNA described herein (e.g., (e.g., an lncRNA transcribed from a genomic region or a subset thereof listed in Table 10 or Table 12, an lncRNA comprising a sequence or a fragment thereof listed in Table 11, an lncRNA sharing at least 80%, 85%, 90% or 95% sequence homology with a full-length sequence listed in Table 11, or an lncRNA sharing at least 80%, 85%, 90% or 95% sequence homology with a fragment of a sequence listed in Table 11); and (c) diagnosing the subject to have a more severe or a progression of the cancer if the expression and/or the activity of the biomarker is at least 50%, at least 60%, at least 70%, at least 80%, or at least 90% higher when compared to a control. In some aspects, the detecting comprises using S1 nuclease protection assay, microarray analysis, polymerase chain reaction (PCR), hybridization technologies, reverse transcriptase polymerase chain reaction (RT-PCR), Northern blot, serial analysis of gene expression (SAGE), immunoassay, and/or mass spectrometry. In some aspects, the detecting comprises any sequencing-based methods that include but are not limited to bulk RNA sequencing, single cell or single nucleus RNA sequencing, DNA sequencing, DNA methylation profiling (e.g., for example, average % methylated CpG along the lncRNA locus described herein or the methylation status of specific CpGs within the InRNA locus described herein), sc- or snATAC-seq or bulk ATAC-seq, DNase I assay for accessibility, CUT&RUN or ChIP-seq for specific histone marks (e.g., H3K27ac, H4K16ac, H3K9me3, H3K27me3, H3K4me1, H3K4me3, etc.). In some aspects, the biomarker further comprise INHBA, COL11A1, MMP13, NNMT, LOXL3, PLOD2, TNC, ITGA11, COL5A1, COMP, COL1A1, FN1, LTBP2, COL10A1, NOX4, POSTN, CCN2, LRRC15, DCN, LUM, COL1A2, COL3A1, COL6A2, MMP11, COL11A1, C1QTNF3, CTHRC1, COL12A1, COL10A1, COL5A2, THBS2, AEBP1, ITGA11, PDPN, FAP, COL8A1, or a gene from Table 1, Table 13, or Table 14, as supported by e.g., FIG. 21A. In some aspects, the detecting comprises detecting the activity and/or expression of transcription factors TEAD2, RUNX1, RUNX2, NFATC4. In some aspects, the method further comprises (d) administering the subject the modulator described herein, or the pharmaceutical composition described herein. In some aspects, the cancer is a solid tumor. In some aspects, the solid tumor is breast cancer, colorectum cancer, lung cancer, prostate cancer, bladder cancer, head and neck cancer (e.g., head and neck squamous cell carcinoma), skin cancer (e.g., skin melanoma), pancreatic cancer (e.g., pancreatic ductal adenocarcinoma), liver cancer, esophageal cancer, brain cancer, stomach cancer (e.g., stomach adenocarcinoma), gallbladder cancer, ovarian cancer, colon adenocarcinoma, or sarcoma. In some instances, the sample is a tumor fibroblast sample.

[0165] Further provided herein are methods of predicting severity and progression/metastasis of a cancer in a subject, the method comprising: (a) obtaining a sample from the subject; (b) detecting an expression and/or an activity of a biomarker from the sample, wherein the biomarker comprises a biomarker from the sample, wherein the biomarker comprises INHBA, COL11A1, MMP13, NNMT, LOXL3, PLOD2, TNC, ITGA11, COL5A1, COMP, COL1A1, FN1, LTBP2, COL10A1, NOX4, POSTN, CCN2, LRRC15, DCN, LUM, COL1A2, COL3A1, COL6A2, MMP11, COL11A1, C1QTNF3, CTHRC1, COL12A1, COL10A1, COL5A2, THBS2, AEBP1, ITGA11, PDPN, FAP, COL8A1, TEAD2, RUNX1, RUNX2, NFATC4, or a gene from Table 1, Table 13, or Table 14, or a combination thereof, and (c) diagnosing the subject to have a more severe or a progression of the cancer if the expression and/or the activity of the biomarker is at least 50%, at least 60%, at least 70%, at least 80%, or at least 90% higher when compared to a control. In some aspects, the detecting comprises using S1 nuclease protection assay, microarray analysis, polymerase chain reaction (PCR), hybridization technologies, reverse transcriptase polymerase chain reaction (RT-PCR), Northern blot, serial analysis of gene expression (SAGE), immunoassay, and/or mass spectrometry. In some aspects, the detecting comprises any sequencing-based methods that include but are not limited to bulk RNA sequencing, single cell or single nucleus RNA sequencing, DNA sequencing, DNA methylation profiling (e.g., for example, average % methylated CpG along the lncRNA locus described herein or the methylation status of specific CpGs within the InRNA locus described herein), sc- or snATAC-seq or bulk ATAC-seq, DNase I assay for accessibility, CUT&RUN or ChIP-seq for specific histone marks (e.g., H3K27ac, H4K16ac, H3K9me3, H3K27me3, H3K4me1, H3K4me3, etc.). In some aspects, the method further comprises (d) administering the subject the modulator described herein, or the pharmaceutical composition described herein. In some aspects, the cancer is a solid tumor. In some aspects, the solid tumor is breast cancer, colorectum cancer, lung cancer, prostate cancer, bladder cancer, head and neck cancer (e.g., head and neck squamous cell carcinoma), skin cancer (e.g., skin melanoma), pancreatic cancer (e.g., pancreatic ductal adenocarcinoma), liver cancer, esophageal cancer, brain cancer, stomach cancer (e.g., stomach adenocarcinoma), gallbladder cancer, ovarian cancer, colon adenocarcinoma, or sarcoma. In some instances, the sample is a tumor fibroblast sample.

[0166] As disclosed herein, the number of a subset of fibroblasts enriched with the lncRNA disclosed herein is a reliable prognosis readout (see, e.g., FIG. 21B). Accordingly, further provided herein are methods of predicting severity and progression/metastasis of a cancer in a subject, the method comprising: (a) obtaining a tumor fibroblast sample from the subject; (b) counting a number of fibroblasts that exhibit a higher expression of a biomarker, wherein the biomarker comprises a biomarker from the sample, wherein the biomarker comprises an lncRNA described herein (e.g., (e.g., an lncRNA transcribed from a genomic region or a subset thereof listed in Table 10 or Table 12, an lncRNA comprising a sequence or a fragment thereof listed in Table 11, an lncRNA sharing at least 80%, 85%, 90% or 95% sequence homology with a full-length sequence listed in Table 11, or an lncRNA sharing at least 80%, 85%, 90% or 95% sequence homology with a fragment of a sequence listed in Table 11); and (c) diagnosing the subject to have a more severe or a progression of the cancer if the number of fibroblasts that exhibit a higher expression of the biomarker is higher than the number in a control. In some aspects, the counting in (b) is performed by fluorescence-activated cell sorting (FACS), single cell or single nucleus RNA sequencing combined with cell sorting. In some aspects, the biomarker further comprise INHBA, COL11A1, MMP13, NNMT, LOXL3, PLOD2, TNC, ITGA11, COL5A1, COMP, COL1A1, FN1, LTBP2, COL10A1, NOX4, POSTN, CCN2, LRRC15, DCN, LUM, COL1A2, COL3A1, COL6A2, MMP11, COL11A1, C1QTNF3, CTHRC1, COL12A1, COL10A1, COL5A2, THBS2, AEBP1, ITGA11, PDPN, FAP, COL8A1, or a gene from Table 1, Table 13, or Table 14. In some aspects, the detecting comprises detecting the activity and/or expression of transcription factors TEAD2, RUNX1, RUNX2, NFATC4. In some aspects, the method further comprises (d) administering the subject the modulator described herein, or the pharmaceutical composition described herein. In some aspects, the cancer is a solid tumor. In some aspects, the solid tumor is breast cancer, colorectum cancer, lung cancer, prostate cancer, bladder cancer, head and neck cancer (e.g., head and neck squamous cell carcinoma), skin cancer (e.g., skin melanoma), pancreatic cancer (e.g., pancreatic ductal adenocarcinoma), liver cancer, esophageal cancer, brain cancer, stomach cancer (e.g., stomach adenocarcinoma), gallbladder cancer, ovarian cancer, colon adenocarcinoma, or sarcoma.

[0167] Further provided herein are methods of monitoring an efficacy or therapeutic resistance of a therapy treating a cancer in a subject, the method comprising: (a) obtaining a sample from the subject; (b) detecting an expression and/or an activity of a biomarker from the sample, wherein the biomarker comprises an lncRNA described herein (e.g., an lncRNA transcribed from a genomic region or a subset thereof listed in Table 10 or Table 12, an lncRNA comprising a sequence or a fragment thereof listed in Table 11, an lncRNA sharing at least 80%, 85%, 90% or 95% sequence homology with a full-length sequence listed in Table 11, or an lncRNA sharing at least 80%, 85%, 90% or 95% sequence homology with a fragment of a sequence listed in Table 11); and (c) concluding the therapy treating the cancer is effective or is less likely to develop therapeutic resistance if the expression and/or the activity of the biomarker is at least 10%, at least 20%, at least 30%, at least 40%, at least 50%, at least 60%, at least 70%, at least 80%, or at least 90% reduced by the therapy. In some aspects, the detecting comprises using S1 nuclease protection assay, microarray analysis, polymerase chain reaction (PCR), hybridization technologies, reverse transcriptase polymerase chain reaction (RT-PCR), Northern blot, serial analysis of gene expression (SAGE), immunoassay, and/or mass spectrometry. In some aspects, the detecting comprises any sequencing-based methods that include but are not limited to bulk RNA sequencing, single cell or single nucleus RNA sequencing, DNA sequencing, DNA methylation profiling (e.g., for example, average % methylated CpG along the lncRNA locus described herein or the methylation status of specific CpGs within the InRNA locus described herein), sc- or snATAC-seq or bulk ATAC-seq, DNase I assay for accessibility, CUT&RUN or ChIP-seq for specific histone marks (e.g., H3K27ac, H4K16ac, H3K9me3, H3K27me3, H3K4me1, H3K4me3, etc.). In some aspects, the biomarker further comprise INHBA, COL11A1, MMP13, NNMT, LOXL3, PLOD2, TNC, ITGA11, COL5A1, COMP, COL1A1, FN1, LTBP2, COL10A1, NOX4, POSTN, CCN2, LRRC15, DCN, LUM, COL1A2, COL3A1, COL6A2, MMP11, COL11A1, C1QTNF3, CTHRC1, COL12A1, COL10A1, COL5A2, THBS2, AEBP1, ITGA11, PDPN, FAP, COL8A1,or a gene from Table 1, Table 13, or Table 14. In some aspects, the detecting comprises detecting the activity and/or expression of transcription factors TEAD2, RUNX1, RUNX2, NFATC4. In some aspects, the method further comprises (d) administering the subject the modulator described herein, or the pharmaceutical composition described herein. In some aspects, the cancer is a solid tumor. In some aspects, the solid tumor is breast cancer, colorectum cancer, lung cancer, prostate cancer, bladder cancer, head and neck cancer (e.g., head and neck squamous cell carcinoma), skin cancer (e.g., skin melanoma), pancreatic cancer (e.g., pancreatic ductal adenocarcinoma), liver cancer, esophageal cancer, brain cancer, stomach cancer (e.g., stomach adenocarcinoma), gallbladder cancer, ovarian cancer, colon adenocarcinoma, or sarcoma. In some instances, the sample is a tumor fibroblast sample.

[0168] Further provided herein are methods of monitoring an efficacy or therapeutic resistance of a therapy treating a cancer in a subject, the method comprising: (a) obtaining a sample from the subject; (b) detecting an expression and/or an activity of a biomarker from the sample, wherein the biomarker comprises INHBA, COL11A1, MMP13, NNMT, LOXL3, PLOD2, TNC, ITGA11, COL5A1, COMP, COL1A1, FN1, LTBP2, COL10A1, NOX4, POSTN, CCN2, LRRC15, DCN, LUM, COL1A2, COL3A1, COL6A2, MMP11, COL11A1, C1QTNF3, CTHRC1, COL12A1, COL10A1, COL5A2, THBS2, AEBP1, ITGA11, PDPN, FAP, COL8A1, TEAD2, RUNX1, RUNX2, NFATC4, or a gene from Table 1, Table 13, or Table 14, or a combination thereof; and (c) concluding the therapy treating the cancer is effective or is less likely to develop therapeutic resistance if the expression and/or the activity of the biomarker is at least 10%, at least 20%, at least 30%, at least 40%, at least 50%, at least 60%, at least 70%, at least 80%, or at least 90% reduced by the therapy. In some aspects, the detecting comprises using S1 nuclease protection assay, microarray analysis, polymerase chain reaction (PCR), hybridization technologies, reverse transcriptase polymerase chain reaction (RT-PCR), Northern blot, serial analysis of gene expression (SAGE), immunoassay, and/or mass spectrometry. In some aspects, the detecting comprises any sequencing-based methods that include but are not limited to bulk RNA sequencing, single cell or single nucleus RNA sequencing, DNA sequencing, DNA methylation profiling (e.g., for example, average % methylated CpG along the lncRNA locus described herein or the methylation status of specific CpGs within the InRNA locus described herein), sc- or snATAC-seq or bulk ATAC-seq, DNase I assay for accessibility, CUT&RUN or ChIP-seq for specific histone marks (e.g., H3K27ac, H4K16ac, H3K9me3, H3K27me3, H3K4me1, H3K4me3, etc.). In some aspects, the method further comprises (d) administering the subject the modulator described herein, or the pharmaceutical composition described herein. In some aspects, the cancer is a solid tumor. In some aspects, the solid tumor is breast cancer, colorectum cancer, lung cancer, prostate cancer, bladder cancer, head and neck cancer (e.g., head and neck squamous cell carcinoma), skin cancer (e.g., skin melanoma), pancreatic cancer (e.g., pancreatic ductal adenocarcinoma), liver cancer, esophageal cancer, brain cancer, stomach cancer (e.g., stomach adenocarcinoma), gallbladder cancer, ovarian cancer, colon adenocarcinoma, or sarcoma. In some instances, the sample is a tumor fibroblast sample.

[0169] Further provided herein are methods of monitoring an efficacy or therapeutic resistance of a therapy treating a cancer in a subject, the method comprising: (a) obtaining a tumor fibroblast sample from the subject; (b) counting a number of fibroblasts that exhibit a higher expression of a biomarker, wherein the biomarker comprises a biomarker from the sample, wherein the biomarker comprises an lncRNA described herein (e.g., (e.g., an lncRNA transcribed from a genomic region or a subset thereof listed in Table 10 or Table 12, an lncRNA comprising a sequence or a fragment thereof listed in Table 11, an lncRNA sharing at least 80%, 85%, 90% or 95% sequence homology with a full-length sequence listed in Table 11, or an lncRNA sharing at least 80%, 85%, 90% or 95% sequence homology with a fragment of a sequence listed in Table 11); and (c) concluding the therapy treating the cancer is effective or is less likely to develop therapeutic resistance if the number of fibroblasts that exhibit a higher expression of the biomarker is reduced by the therapy. In some aspects, the counting in (b) is performed by fluorescence-activated cell sorting (FACS), single cell or single nucleus RNA sequencing combined with cell sorting. In some aspects, the biomarker further comprise INHBA, COL11A1, MMP13, NNMT, LOXL3, PLOD2, TNC, ITGA11, COL5A1, COMP, COL1A1, FN1, LTBP2, COL10A1, NOX4, POSTN, CCN2, LRRC15, DCN, LUM, COL1A2, COL3A1, COL6A2, MMP11, COL11A1, C1QTNF3, CTHRC1, COL12A1, COL10A1, COL5A2, THBS2, AEBP1, ITGA11, PDPN, FAP, COL8A1, or a gene from Table 1, Table 13, or Table 14. In some aspects, the detecting comprises detecting the activity and/or expression of transcription factors TEAD2, RUNX1, RUNX2, NFATC4. In some aspects, the method further comprises (d) administering the subject the modulator described herein, or the pharmaceutical composition described herein. In some aspects, the cancer is a solid tumor. In some aspects, the solid tumor is breast cancer, colorectum cancer, lung cancer, prostate cancer, bladder cancer, head and neck cancer (e.g., head and neck squamous cell carcinoma), skin cancer (e.g., skin melanoma), pancreatic cancer (e.g., pancreatic ductal adenocarcinoma), liver cancer, esophageal cancer, brain cancer, stomach cancer (e.g., stomach adenocarcinoma), gallbladder cancer, ovarian cancer, colon adenocarcinoma, or sarcoma.

### Certain Terminology

[0170] The term “noncoding RNA” as used herein, can refer to RNA species that are not translated into protein. The term “long noncoding RNA” or “lncRNA” as used herein, refers to a noncoding RNA that is at least 100, 200, 300, 400, 500, 600, 700, 800, 900, or 1000 nucleotides long. In some instances, “long noncoding RNA” or “lncRNA” comprises at least 1, 2, 3, 4, 5, 6, 7, 8, 9, or 10 exons.

[0171] The term “myCAF” or “myofibroblast CAF” or “myofibroblast cancer-associated fibroblasts” as used herein, can refer to cancer-associated fibroblasts (CAFs) that is associated with collagen-fibril organization, extracellular matrix (ECM) organization, tumor innervation and/or tissue development in tumor microenvironment. In some instanced “myCAF” or “myofibroblast CAF” or “myofibroblast cancer-associated fibroblasts” exhibits a higher expression of an ECM-modulatory gene when compared to a fibroblast that is not associated with cancer.

[0172] The term “healthy cell” as used herein refers to in healthy cells of a healthy individual. In some instances, it refers to a cell of the same subject but before contracting any disorders, such as cancer.

[0173] The term “normal tissues” as used herein refers to in healthy tissues of a healthy individual. In some instances, it refers to a tissue of the same subject but before contracting any disorders, such as cancer.

[0174] The term “nucleic acid editing or modifying moiety,” as used herein, can refer to a moiety that edits or cleaves the target nucleic acid. It can also refer to a moiety that suppresses the transcription of the target nucleic acid.

[0175] The term “nucleic acid analogue,” as used herein, can refer to compounds which are analogous (structurally similar) to naturally occurring nucleic acid (see, e.g., Freier & Altmann; Nucl. Acid. Res., 1997, 25, 4429-4443 and Uhlmann; Curr. Opinion in Drug Development, 2000, 3(2), 293-213), and examples of suitable nucleic acid analogues are provided by WO2007031091, which are hereby incorporated by reference.

[0176] The term “gapmer” is a chimeric nucleic acid that contains a central sequence of phosphorothioate DNA nucleotides (“DNA gap”) flanked by sequences of modified RNA residues at either end to protect the DNA gap from nuclease degradation, whereas the central DNA gap region allows RNase-H-mediated cleavage of the target RNA. Gapmer has an internal region having a plurality of nucleosides which is capable of recruiting RNase H activity, such as RNaseH, which region is positioned between external wings at either end, having one or more nucleosides, wherein the nucleosides comprising the internal region are chemically distinct from the nucleoside or nucleosides comprising the external wings.

[0177] A “locked nucleic acid” or “LNA” is often referred to as inaccessible RNA, and is a modified RNA nucleobase. The ribose moiety of an LNA nucleobase is modified with an extra bridge connecting the 2′ oxygen and 4′ carbon. An LNA oligonucleotide offers substantially increased affinity for its complementary strand, compared to traditional DNA or RNA oligonucleotides.

[0178] The terms “polynucleotide,” “oligonucleotide,” “nucleic acid” and “nucleic acid molecule” are used herein to include a polymeric form of nucleotides of any length, either ribonucleotides or deoxyribonucleotides. This term refers to the primary structure of the molecule. Thus, the term includes triple-, double- and single-stranded DNA, as well as triple-, double- and single-stranded RNA. In some aspects, it also includes modifications, such as by methylation and/or by capping, and unmodified forms of the polynucleotide. More particularly, the terms “polynucleotide,” “oligonucleotide,” “nucleic acid” and “nucleic acid molecule” include polydeoxyribonucleotides (containing 2-deoxy-D-ribose), polyribonucleotides (containing D-ribose), any other type of polynucleotide which is an N- or C-glycoside of a purine or pyrimidine base, and other polymers containing nonnucleotidic backbones, for example, polyamide (e.g., peptide nucleic acids (PNAs)) and polymorpholino (commercially available from the Anti-Vials, Inc., Corvallis, Oreg., as Neugene) polymers, and other synthetic sequence-specific nucleic acid polymers providing that the polymers contain nucleobases in a configuration which allows for base pairing and base stacking, such as is found in DNA and RNA. There is no intended distinction in length between the terms “polynucleotide,” “oligonucleotide,” “nucleic acid” and “nucleic acid molecule,” and these terms will be used interchangeably. Thus, these terms include, for example, RNA, double- and single-stranded DNA, as well as double- and single-stranded RNA, microRNA, DNA:RNA hybrids, and hybrids between PNAs and DNA or RNA, and also include known types of modifications, for example, labels which are known in the art, methylation, “caps,” substitution of one or more of the naturally occurring nucleotides with an analog (e.g., 2′-aminoadenosine, 2′-thiothymidine, inosine, pyrrolo-pyrimidine, 3′-methyl adenosine, C5-propynylcytidine, C5-propynyluridine, C5-bromouridine, C5-fluorouridine, C5-iodouridine, C5-methylcytidine, 7-deazaadenosine, 7-deazaguanosine, 8-oxoadenosine, 8-oxoguanosine, 0(6)-methylguanine, and 2′-thiocytidine), internucleotide modifications such as, for example, those with uncharged linkages (e.g., methyl phosphonates, phosphotriesters, phosphoramidates, carbamates, etc.), with negatively charged linkages (e.g., phosphorothioates, phosphorodithioates, etc.), and with positively charged linkages (e.g., aminoalklyphosphoramidates, aminoalkylphosphotriesters), those containing pendant moieties, such as, for example, proteins (including nucleases, toxins, antibodies, signal peptides, poly-L-lysine, etc.), those with intercalators (e.g., acridine, psoralen, etc.), those containing chelators (e.g., metals, radioactive metals, boron, oxidative metals, etc.), those containing alkylators, those with modified linkages (e.g., alpha anomeric nucleic acids, etc.), as well as unmodified forms of the polynucleotide or oligonucleotide. The term also includes locked nucleic acids (e.g., comprising a ribonucleotide that has a methylene bridge between the 2′-oxygen atom and the 4′-carbon atom). See, for example, Kurreck et al. (2002) Nucleic Acids Res. 30: 1911-1918.

[0179] The terms “siRNA” and “short interfering RNA” are interchangeable and refer to single-stranded or double-stranded RNA molecules that are capable of inducing RNA interference. In some aspects, siRNA molecules have a duplex region that is between 18 and 30 nucleotides in length.

[0180] The terms “microRNA,” “miRNA,” and MiR” are interchangeable and refer to endogenous or artificial non-coding RNAs that are capable of regulating gene expression. It is believed that miRNAs function via RNA interference.

[0181] The terms “piRNA” and “Piwi-interacting RNA” are interchangeable and refer to a class of small RNAs involved in gene silencing. In some instances, piRNA molecules are between 26 and 31 nucleotides in length.

[0182] The terms “snRNA” and “small nuclear RNA” are interchangeable and refer to a class of small RNAs involved in a variety of processes including RNA splicing and regulation of transcription factors. The subclass of small nucleolar RNAs (snoRNAs) is also included. The term is also intended to include artificial snRNAs, such as antisense derivatives of snRNAs comprising antisense sequences directed against one or more lncRNAs of the disclosure.

[0183] The term “complementary” and “complementarity” are interchangeable and refer to the ability of polynucleotides to form nucleotides with one another. In some instances, nucleotides are formed by hydrogen bonds between nucleotide units in antiparallel polynucleotide strands or regions. Complementary polynucleotide strands or regions can base pair in the Watson-Crick manner (e.g., A to T, A to U, C to G). 100% complementary refers to the situation in which each nucleotide unit of one polynucleotide strand or region can hydrogen bond with each nucleotide unit of a second polynucleotide strand or region. Less than perfect complementarity refers to the situation in which some, but not all, nucleotide units of two strands or two regions can hydrogen bond with each other and can be expressed as a percentage.

[0184] “Administering”, as it applies in the present disclosure, refers to contact of an effective amount of a modulator of one or more lncRNAs of the disclosure, to the subject. Administering a nucleic acid, such as a microRNA, siRNA, piRNA, snRNA, or antisense nucleic acid, to a cell comprises transducing, transfecting, electroporating, translocating, fusing, phagocytosing, shooting or ballistic methods, or any means by which a nucleic acid can be transported across a cell membrane.

[0185] “Pharmaceutically acceptable excipient or carrier” refers to an excipient that may optionally be included in the compositions of the disclosure and that causes no significant adverse toxicological effects to the patient.

[0186] “Pharmaceutically acceptable salt” includes, but is not limited to, amino acid salts, salts prepared with inorganic acids, such as chloride, sulfate, phosphate, diphosphate, bromide, and nitrate salts, or salts prepared from the corresponding inorganic acid form of any of the preceding, e.g., hydrochloride, etc., or salts prepared with an organic acid, such as malate, maleate, fumarate, tartrate, succinate, ethylsuccinate, citrate, acetate, lactate, methanesulfonate, benzoate, ascorbate, para-toluenesulfonate, palmoate, salicylate and stearate, as well as estolate, gluceptate and lactobionate salts. Similarly salts containing pharmaceutically acceptable cations include, but are not limited to, sodium, potassium, calcium, aluminum, lithium, and ammonium (including substituted ammonium).

[0187] An “effective amount” of modulator of one or more lncRNAs of the disclosure (e.g., microRNA, siRNA, piRNA, snRNA, antisense nucleic acid, ribozyme, or small molecule inhibitor, CRISPRs etc.) is an amount sufficient to effect beneficial or desired results, such as an amount that inhibits the activity of a lncRNA, for example by interfering with transcription. An effective amount can be administered in one or more administrations, applications, or dosages.

[0188] By “therapeutically effective dose or amount” of a modulator of one or more lncRNAs of the disclosure is intended an amount that, when administered as described herein, brings about a positive therapeutic response. The exact amount required will vary from subject to subject, depending on the species, age, and general condition of the subject, the severity of the condition being treated, the particular drug or drugs employed, mode of administration, and the like. An appropriate “effective” amount in any individual case may be determined by one of ordinary skill in the art using routine experimentation, based upon the information provided herein.

[0189] In general, “identity” refers to an exact nucleotide to nucleotide or amino acid to amino acid correspondence of two polynucleotides or polypeptide sequences, respectively. Percent identity can be determined by a direct comparison of the sequence information between two molecules by aligning the sequences, counting the exact number of matches between the two aligned sequences, dividing by the length of the shorter sequence, and multiplying the result by 100. Alternatively, homology can be determined by readily available computer programs or by hybridization of polynucleotides under conditions which form stable duplexes between homologous regions, followed by digestion with single stranded specific nuclease(s), and size determination of the digested fragments. DNA sequences that are substantially homologous can be identified in a Southern hybridization experiment under, for example, stringent conditions, as defined for that particular system. Defining appropriate hybridization conditions is within the skill of the art.

[0190] As used herein, a “sample” refers to a sample of tissue or fluid isolated from a subject, including but not limited to, for example, urine, blood, plasma, serum, fecal matter, bone marrow, bile, spinal fluid, lymph fluid, samples of the skin, external secretions of the skin, respiratory, intestinal, and genitourinary tracts, tears, saliva, milk, blood cells, organs, biopsies, and also samples containing cells or tissues derived from the subject and grown in culture, and in vitro cell culture constituents, including but not limited to, conditioned media resulting from the growth of cells and tissues in culture, recombinant cells, stem cells, and cell components.

[0191] The terms “quantity,” “amount,” and “level” are used interchangeably herein and may refer to an absolute quantification of a molecule or an analyte in a sample, or to a relative quantification of a molecule or analyte in a sample, i.e., relative to another value such as relative to a reference value as taught herein, or to a range of values for the biomarker. These values or ranges can be obtained from a single patient or from a group of patients.

[0192] “Diagnosis” as used herein generally includes determination as to whether a subject is likely affected by a given disease, disorder or dysfunction of the disclosure. The skilled artisan often makes a diagnosis on the basis of one or more diagnostic indicators (e.g., a biomarker), the presence, absence, or amount of which is indicative of the presence or absence of the disease, disorder or dysfunction.

[0193] The term “comprising” (and related terms such as “comprise” or “comprises” or “having” or “including”) is not intended to exclude that in other certain instances, for example, an instance of any composition of matter, composition, method, or process, or the like, described herein, “consist of” or “consist essentially of” the described features.

[0194] The term “subject” or “patient,” as used herein, generally encompasses organisms such as mammals. Examples of mammals include, but are not limited to, any member of the mammalian class: humans, non-human primates, such as chimpanzees, and other apes and monkey species; farm animals, such as cattle, horses, sheep, goats, swine; domestic animals, such as rabbits, dogs, and cats; laboratory animals, including rodents, such as rats, mice and guinea pigs, and the like.

[0195] In one aspect, the mammal is a human.

[0196] The term “treatment” or “treating,” as used herein, are used interchangeably. These terms generally refer to an approach for obtaining beneficial or desired results including but not limited to therapeutic benefit and/or a prophylactic benefit. In some instances, the term refers to eradication of the underlying disorder being treated. In other instances, the term refers to the eradication of one or more of the physiological symptoms associated with the underlying disorder such that an improvement is observed in the patient, notwithstanding that the patient is still afflicted with the underlying disorder.

[0197] The term “alleviating” or “alleviate,” as used herein, refers to amelioration, improving, or stalling the further progression of the underlying disorder being treated. In other instances, the term refers to the amelioration, improving, or stalling the further progression of one or more of the physiological symptoms associated with the underlying disorder such that an improvement is observed in the patient, notwithstanding that the patient is still afflicted with the underlying disorder.

[0198] The term “preventing” or “prevent,” as used herein, refers to the situation where the compositions disclosed herein are administered to a patient at risk of developing a particular disease, or to a patient reporting one or more of the physiological symptoms of a disease, even though a diagnosis of this disease has not been made.

[0199] Whenever the term “at least,” “more than,” or “less than” precedes the first numerical value in a series of two or more numerical values, the term “at least,” “greater than” or “greater than or equal to” applies to each of the numerical values in that series of numerical values. For example, greater than or equal to 1, 2, or 3 is equivalent to greater than or equal to 1, greater than or equal to 2, or greater than or equal to 3.

[0200] The term “a,” “an” and “the” include plural referents unless the content clearly dictates otherwise. Thus, for example, reference to “a lncRNA” includes a mixture of two or more lncRNAs, and the like.

[0201] As used herein, “or” may refer to “and”, “or,” or “and/or” and may be used both exclusively and inclusively. For example, the term “A or B” may refer to “A or B”, “A but not B”, “B but not A”, and “A and B”. In some cases, context may dictate a particular meaning.

[0202] The term “about,” particularly in reference to a given quantity, is meant to encompass deviations of plus or minus ten percent.

### EXAMPLES

[0203] The following is a description of various non-limiting examples of methods and materials used in the studies, and are put forth so as to provide those of ordinary skill in the art with a complete disclosure and description of how to make and use the present disclosure, and are not intended to limit the scope of the disclosure nor are they intended to represent that the experiments below were performed and are all of the experiments that may be performed.

[0204] Efforts have been made to ensure accuracy with respect to numbers used (e.g., amounts, percentages, etc.), but some experimental errors and deviations should be accounted for.

### Example 1: Discovery of Target Long Noncoding RNA (OncRNA) Candidates Involved in Cancer Associated Fibroblast (CAF) Pro-Tumorigenic Function

[0205] Cancer associated fibroblasts (CAFs) are involved in pro-tumorigenic functions that contribute to the development of cancers, such as head and neck squamous cell carcinoma (HNSCC). To explore whether long non-coding RNAs (lncRNAs) may be involved in CAF pro-tumorigenic functions, target lncRNAs candidates that may be associated with pro-tumorigenic CAF were identified using the workflow. Deep bulk RNA-seq data of human dermal fibroblasts (HDFs) and induced CAFs were generated and analyzed by first quality evaluating raw sequencing files using FastQC program and mapping to the Genome Reference Consortium Human Build 38 (GRCh38/hg38) reference genome assembly using Spliced Transcript Alignment to a Reference (STAR) program. The sequencing files were further processed with a pipeline based on StringTie and Cufflinks tools to assemble the transcriptome and identify novel lncRNAs. Novel lncRNAs were defined to be un-annotated genes of 200 bp and >1 exon that were predicted to be non-coding. To filter the list of novel lncRNAs for lncRNA candidates, lncRNA expression quantification, using the featureCounts tool, was analyzed. In addition, protein-coding genes (PCGs) near each of the lncRNA locus was identified using BEDOPS program to identify lncRNA candidates with nearby CAF-relevant PCGs (e.g., LRRC15, COL12A1, DYRK2, FN1, CAPN9). A CAF-relevant PCG nearby the lncRNA can indicate a potential co-regulatory function. The workflow also involved analyzing the identified lncRNA candidates with public dataset, which included scRNA-seq data from HNSCC patients, bulk RNA-seq data from The Cancer Genome Atlas (TCGA)-HNSCC samples, and Encyclopedia of DNA Elements (ENCODE)/Genotype-Tissue Expression (GTEx) database, to further select lncRNA candidates of interest.

[0206] To analyze the identified lncRNA candidates from dataset with publicly available scRNA-seq data from HNSCC patients, the scRNA-seq data (Puram et al, Single-cell transcriptomic analysis of primary and metastatic tumor ecosystems in head and neck cancer.

[0207] Cell 171(7), 2017) was obtained and Spearman's correlation coefficient of the global transcriptome between all pairs of cells in the raw and processed data was calculated to classify the cell as malignant versus non-malignant. Cell types were inferred to non-malignant cells with the Seurat's label transfer method (e.g., FindTransferAnchors), using the processed data as the reference and raw data as query to identify lncRNAs that were in non-malignant cells in the tumor microenvironment. Next, the fibroblasts (FBs) were sub-clustered using Seurat's method FindClusters at a resolution of 0.6 to identify lncRNAs of non-malignant fibroblasts. The FB sub-cluster identities were validated by either individual gene expression (e.g., MCAM and RGS5 as pericyte-markers) or gene set enrichment analysis of CAF-relevant marker lists, using SingScore R package. Results identified cluster 0 and 1 to be made up of pericyte-like cells. Clusters 2 and 3 were found to comprise of CAFs, with cluster 2 made up specifically of myofibroblast CAFs (myCAF)-like. Cluster 4 was identified to be made up of resident FB-like cells. For quantification of lncRNA candidates identified from dataset in the HNSCC CAF sub-clusters, the Salmon mapping-based quantification program was used to quantify gene-level expression across the cells of the HNSCC scRNA-seq dataset. The dataset was then log-normalized and scaled. As shown in the heatmap representation of the results in FIG. 1A, candidate target lncRNAs called Stromal Enhancer Associated lncRNAs (SEALs; SEAL1, SEAL2, SEAL3, SEAL4, SEAL5, SEAL6, SEAL7, see Table 10) were highly expressed in fibroblasts. In particular, heatmap representation of gene expression in the HNSCC CAF sub-clusters showed that SEAL1, SEAL3, SEAL5, and SEAL6 were specifically expressed in HNSCC FB cluster 2, representing myCAFs (FIG. 1A). Out of the 7 SEALs, SEAL1, SEAL2, and SEAL3 were not previously annotated lncRNAs. To identify further potential lncRNA candidates based on the HNSCC scRNA-seq data, lncRNAs that were differentially upregulated (based on log 2FC >1) in TGFβ and/or COMB induced CAFs and also differentially upregulated in the HNSCC cluster 2 myCAF-like FBs (based on adjusted p-value 0.05 and log 2FC >0) were extracted. Out ofthose lncRNAs, the ones showing particularly specific expression in cluster 2 FBs and low expression in the other FB clusters, were selected (FIG. 1D, Table 12). LncRNAs that were differentially upregulated in TGFβ and/or COMB induced CAFs (based on adjusted p-value≤0.05 and log 2FC >0.5) were also assessed for presence of a human colorectal cancer CAF super-enhancer (SE) region. SE regions were identified by Rank Ordering of Super-Enhancers (ROSE) algorithm using a publicly available dataset of primary colorectal cancer CAF H3K27ac ChIP-seq data (Lee et al, PRRX1 is a master transcription factor of stromal fibroblasts for myofibroblastic lineage progression. Nature Communications 19(1), 2022). LncRNAs that were differentially upregulated and associated with a SE region were assessed for tissue specificity and lncRNAs showing a higher expression in induced CAFs than in normal tissues (FIG. 1E, Table 12) were selected as candidate lncRNAs. Antisense lncRNAs were only compared to the ENCODE project data repository as those data contain strand information (antisense lncRNAs are strand-specific).

TABLE 12
Genomic regions (coordinates with strand information)
which encode IncRNAs associated with myCAF

| LncRNA name | LncRNA category | Genomic coordinates (strand) |
|---|---|---|
| XLOC_068808 | Antisense, novel | chr6: 169218159-169219142 (+) |
| ENSG00000267013.6 | Intergenic, annotated | chr18: 55105904-55124306 (−) |
| ENSG00000226012.1 | Antisense, annotated | chr21: 38237217-38238201 (−) |
| XLOC_044415 | Antisense, novel | chr2: 215373406-215380595 (+) |
| XLOC_003858 | Antisense, novel | chr1: 245799772-245813879 (+) |
| ENSG00000222032.2 | Intergenic, annotated | chr2: 237428920-237434883 (−) |
| ENSG00000227925.2 | Intergenic, annotated | chr1: 221819842-221840717 (−) |
| XLOC_083933 | Antisense, novel | chr9: 134828897-134829761 (−) |
| XLOC_056327 | Antisense, novel | chr3: 55066447-55098407 (−) |
| ENSG00000243572.1 | Intergenic, annotated | chr3: 55178172-55189525 (+) |
| ENSG00000284879.1 | Antisense, annotated | chr2: 87455476-87767359 (+) |
| ENSG00000277855.1 | Antisense, annotated | chr3: 71581721-71628694 (+) |
| ENSG00000287543.1 | Antisense, annotated | chr15: 74040190-74043332 (−) |
| XLOC_034797 | Antisense, novel | chr17: 76361430-76372793 (−) |
| XLOC_049117 | Antisense, novel | chr20: 4163106-4172518 (−) |
| ENSG00000228509.7 | Antisense, annotated | chr2: 190672297-190843734 (−) |
| ENSG00000224228.2 | Antisense, annotated | chr1: 172775905-173064474 (+) |
| XLOC_017545 | Antisense, novel | chr12: 1504740-1532192 (−) |
| ENSG00000287326.1 | Antisense, annotated | chr10: 126387092-126460957 (+) |
| ENSG00000229647.3 | Antisense, annotated | chr2: 207166120-207249105 (+) |
| ENSG00000233860.2 | Antisense, annotated | chr4: 76708853-76802426 (−) |
| ENSG00000238280.2 | Antisense, annotated | chr10: 62624249-62805887 (−) |
| XLOC_057414 | Antisense, novel | chr3: 156480878-156492990 (−) |
| ENSG00000224020.2 | Antisense, annotated | chr9: 124658412-124744618 (+) |
| ENSG00000236682.3 | Antisense, annotated | chr2: 127387077-127406228 (+) |
| ENSG00000228035.1 | Antisense, annotated | chr1: 115229423-115368072 (+) |
| ENSG00000249406.3 | Antisense, annotated | chr17: 50199876-50215922 (+) |
| XLOC_016448 | Antisense, novel | chr12: 57239370-57243163 (+) |
| ENSG00000232774.8 | Antisense, annotated | chr14: 61570405-61662070 (+) |
| ENSG00000270562.1 | Antisense, annotated | chr3: 71584943-71587409 (+) |
| XLOC_070348 | Antisense, novel | chr6: 116351101-116371719 (−) |
| XLOC_020518 | Antisense, novel | chr13: 101694567-101706175 (+) |
| ENSG00000284879.1 | Antisense, annotated | chr2: 87455476-87767359 (+) |
| ENSG00000235531.11 | Antisense, annotated | chr8: 71828167-72121231 (+) |
| XLOC_037197 | Antisense, novel | chr19: 2602781-2612054 (+) |
| ENSG00000287828.1 | Antisense, annotated | chr1: 3306636-3327974 (−) |
| ENSG00000261373.1 | Antisense, annotated | chr16: 89711856-89718165 (+) |
| ENSG00000285016.1 | Antisense, annotated | chr2: 111429324-111699033 (−) |
| XLOC_036757 | Intergenic, novel | chr18: 55786092-55840306 (−) |
| XLOC_037746 | Intergenic, novel | chr19: 18791314-18799563 (+) |
| ENSG00000175746.7 | Intergenic, annotated | chr15: 39250669-39254845 (+) |
| ENSG00000225166.2 | Intergenic, annotated | chr2: 215438221-215486639 (+) |
| XLOC_006844 | Intergenic, novel | chr1: 200326148-200337384 (−) |
| XLOC_074690 | Intergenic, novel | chr7: 1288260-1291258 (−) |
| ENSG00000222022.1 | Intergenic, annotated | chr2: 237421420-237425276 (−) |
| ENSG00000222032.2 | Intergenic, annotated | chr2: 237428920-237434883 (−) |
| ENSG00000258976.1 | Intergenic, annotated | chr14: 74614433-74616647 (−) |
| ENSG00000229373.9 | Intergenic, annotated | chr13: 113888222-113923512 (+) |
| XLOC_083928 | Intergenic, novel | chr9: 134622841-134625269 (−) |
| ENSG00000204362.6 | Intergenic, annotated | chr1: 17185833-17198177 (+) |
| ENSG00000226808.3 | Intergenic, annotated | chr10: 43778946-43901004 (+) |
| ENSG00000249628.3 | Intergenic, annotated | chr12: 1500491-1510070 (+) |
| ENSG00000288791.1 | Intergenic, annotated | chr2: 215758890-215777870 (+) |
| ENSG00000227925.2 | Intergenic, annotated | chr1: 221819842-221840717 (−) |
| XLOC_004087 | Intergenic, novel | chr1: 3482551-3487051 (−) |
| ENSG00000238042.5 | Intergenic, annotated | chr1: 221812364-221978523 (−) |
| ENSG00000203721.8 | Intergenic, annotated | chr1: 200253419-200400705 (−) |
| ENSG00000287865.1 | Intergenic, annotated | chr7: 155213744-155242723 (+) |
| ENSG00000248187.1 | Intergenic, annotated | chr4: 128563770-128570567 (−) |
| ENSG00000230838.2 | Intergenic, annotated | chr2: 215718043-215720946 (+) |
| ENSG00000223485.5 | Intergenic, annotated | chr6: 169151349-169163007 (−) |
| ENSG00000250064.1 | Intergenic, annotated | chr4: 28117558-28638131 (+) |
| ENSG00000231405.1 | Intergenic, annotated | chr22: 27138352-27159878 (+) |
| ENSG00000233521.8 | Intergenic, annotated | chr22: 27220842-27225134 (−) |
| ENSG00000250038.7 | Intergenic, annotated | chr4: 28315671-28402936 (−) |
| ENSG00000268941.2 | Intergenic, annotated | chr20: 58622930-58635835 (+) |
| ENSG00000248996.1 | Antisense, annotated | chr5: 177494995-177503647 (+) |
| XLOC_031538 (SEAL16) | Antisense, novel | chr17: 13541892-13545884 (+) |
| XLOC_067725 (SEAL18) | Intergenic, novel | chr6: 74872099-74902546 (+) |
| ENSG00000282041.1 | Intergenic, annotated | chr22: 35376422-35377261 (+) |
| XLOC_069924 (SEAL17) | Intergenic, novel | chr6: 75030717-75046445 (−) |
| ENSG00000223786.1 | Intergenic, annotated | chr6: 74069451-74690727 (+) |
| ENSG00000232679.2 | Intergenic, annotated | chr1: 221996310-222064797 (−) |
| XLOC_075178 (SEAL14) | | chr7: 40706463-40711285 (−) |
| XLOC-054623 (SEAL15) | | chr3: 124845800-124846379 (+) |
| XLOC_049867 (SEAL19) | | chr20: 57985899-57999562 (−) |

[0208] LncRNA candidates identified from dataset were analyzed with another publicly available scRNA-seq data from HNSCC patients that includes patient samples from different stages of tumor progression (Choi et al, Single-cell transcriptome profiling of the stepwise progression of head and neck cancer. Nature Communications 14(1), 2023). Seurat package was used for preprocessing analysis. Seurat Object was created by including cells that have at least 100 genes detected, and genes expressed in at least 3 cells. RunH-armony integration was then performed to adjust for ample condition batch effects (parameters theta=0, lambda1, sigma=0.1), followed by UMAP dimensionality reduction (dims=1:50). Seurat's method FindClusters was used to first identify the cell types and then the Fibroblast (FB) sub-clusters. The expression of FB markers, DCN, LUM, COL1A1, COL1A2, COLUA1, and COL6A2, was confirmed to be predominantly expressed by the FB cluster, wherein epithelial cells were recognized by their expression of epithelial cell markers (e.g., KRT17, KRT6A, KRT5, KRT19, KRT8, KRT16, KIRT18, KIRT6B, KRT15, KRT6C, KARTCAP3, SFN, and EPCAM) and distinct from the FB cluster. FB sub-clusters 2 and 3 were annotated to be myCAF-like based on gene set enrichment analysis of a myCAF marker list using the SingScore R package. FBs of each sample condition (normal tissue, pre-cancerous leukoplakia and primary cancer) were then analyzed. The majority of normal tissue FBs were composed of sub-clusters 0, 1 and 4, leukoplakia FBs partially of sub-cluster 0 but mainly of sub-cluster 2, and primary cancer partially of sub-cluster 2 but mainly of sub-cluster 3. Based on this analysis, the sub-cluster 2 FBs were defined as partially transitioned myCAFs and sub-cluster 3 as fully differentiated myCAFs. To define a myCAF signature which is specific for the fully differentiated myCAF state, the protein-coding genes (PCGs) differentially upregulated in primary cancer FBs sub-cluster 2+3, as compared to normal tissue FBs sub-clusters 0+1+4 were extracted. The primary cancer FBs upregulated PCGs were then intersected with the myCAF marker list (Buechler et al, Cross-tissue organization of the fibroblast lineage. Nature 593(7860), 2023) used above, giving 198 PCGs in common between the two lists. These 198 PCGs constitute a defined myCAF signature that was used for subsequent analyses (Table 13). This defined myCAF signature was confirmed to not be expressed in normal tissue FBs, to be partially expressed in leukoplakia FBs and particularly enriched in primary cancer FBs, as assessed using the SingScore R package. Further, the scRNA-seq data from HNSCC patients that includes patient samples from different stages of tumor progression was used for deconvolution of the TCGA-HNSC bulk RNA-seq data using BayesPrism (Chu et al, Cell type and gene expression deconvolution with BayesPrism enables Bayesian integrative analysis across bulk and single-cell RNA sequencing in oncology. Nat Cancer 3(4), 2022). By this analysis, the TCGA-HNSC patient (n=499) cohort was partitioned based on HNSCC Cluster 3 nyCAF fraction, identifying myCAF fraction—High (n=145) vs nyCAF fraction—Low (n=354) patient groups. Kaplan-Meier survival analysis based on Overall Survival (OS) was then performed, showing that the myCAF fraction—High patient category was associated with significantly (p=0.0074) worse OS compared to the myCAF fraction—Low patient category, with a median survival of 2.5 years as compared to 4.5 years, respectively (FIG. 21A). This finding was validated in another independent HNSCC sc-RNA-seq dataset. This suggested that the myCAF signature marks a cell population of prognostic value in a large patient cohort, further emphasizing this signature as a relevant read-out for unfavorable myCAF disease-states.

[0209] Next, lncRNAs were identified by deep RNA-sequencing of HDFs and induced CAFs (e.g., 150 million reads/sample). Specifically, an in-house reconstructed gtf of controlled or induced CAFs was created, containing information about 76685 genes. Out of these 76685 genes, 46335 genes were identified to encode annotated mRNAs (n=20006, 43%), annotated lncRNAs (n=17568, 38%) or novel lncRNAs (n=8761, 19%). Novel lncRNA genes were defined as previously un-annotated genes encoding transcripts of more than 200 bp, with more than one exon, and of predicted non-coding potential. While these three gene categories represent around 61% of the total number of genes, they encode for around 90% (n=331332 mRNA, n=74230 annotated lncRNA and n=13236 novel lncRNA transcripts) of the total number (467369) of transcripts, thereby constituting the majority of the transcriptome. Other gene categories such as novel mRNA genes, pseudogenes or other non-coding RNA genes were therefore not considered in the current study. These gene categories were further evaluated for their expression across human normal tissues of the ENCODE repository. Annotated mRNA genes did not show tissue specific expression while, in contrary, lncRNA genes displayed higher tissue specificity. Novel lncRNA genes surpassed the other gene categories with a majority showing high tissue specificity.

[0210] The identified lncRNAs were selected based on having overlapping (antisense lncRNAs), or neighboring (intergenic lncRNAs), loci with PCGs of the defined myCAF signature. They were further selected based on having a positive fold change (log 2FC) expression induction in induced CAFs, as compared to HDFs. The top 10 antisense lncRNAs identified were SEAL14, ITPRIP-AS1, SEAL15, P4HA3-AS1, SEAL16, PDLIM7-AS1, SEAL9, SEAL1, and NKILA. The top 10 intergenic lncRNAs identified were LINC03004, LINC02093, ENSG0000282041, SEAL17, SEAL18, ENSG00000287335, ENSG00000223786, SEAL19, SEAL6, and LINC01705.

[0211] Some of these lncRNAs were found to be expressed in fibroblasts of HNSCC, with a subset of the lncRNAs associated with a specific fibroblast sub-cluster. The top 10, based on log 2FC expression, antisense and intergenic lncRNAs of this category were evaluated for tissue specificity using the ENCODE project and GTEx portal data repositories as described. For antisense lncRNAs, only ENCODE project data was analyzed as that data is strand-specific (strand-specific data is required to accurately quantify antisense lncRNA expression). As shown in FIG. 1F, 4 out of the 10 antisense lncRNAs (including SEAL1 and SEAL9) and 6 out of the 10 intergenic lncRNAs (including SEAL6) showed higher expression in induced CAFs than the inter-quartile range (IQR) expression across human normal tissues (Table 12).

TABLE 13
Additional myCAF marker signature genes
Gene name

ACTA2, ACTN1, ADAM12, ADAMTS12, AEBP1, ALDH18A1, ANTXR1, ARF4, ARL4C, BACE2, BASP1,
BGN, BHLHE40, BMP1, BST2, C11orf24, C1orf198, C1QTNF6, CADM1, CALD1, CALU, CCND1, CD276,
CDC42EP3, CERCAM, CHN1, CHPF, CKAP4, CLEC11A, CLIC4, CNN2, COL10A1, COL11A1, COL12A1,
COL1A1, COL1A2, COL5A2, COL8A1, COLGALT1, CREB3L1, CSRP2, CTHRC1, CTSB, CTSK, CTSZ,
CXCL2, CXCL3, DAP, DIO2, DPYSL3, DUSP10, EDIL3, EDNRA, EFEMP2, EGFL6, ERN1, FAP, FBXO32,
FKBP10, FN1, FSCN1, FZD1, GAPDH, GEM, GGT5, GJA1, GLT8D2, GOLM1, GPX7, GPX8, GREM1,
HAPLN3, HCFC1R1, HES4, HLA-B, HLA-C, HS3ST3A1, ID1, ID4, IER3, IFI27, IFI6, IL32, INHBA, ITGB5,
ITPRIP, KDELR2, KDELR3, KIAA1217, KIF26B, KLF6, LAMP5, LEF1, LMCD1, LMO7, LOXL2, LRRC15,
LUM, MAGED1, MARCKSL1, MARVELD1, MDK, MICAL2, MIF, MMP11, MMP14, MMP19, MMP2,
MSRB3, MXRA5, MYH9, MYL9, NEK6, NR4A2, NREP, NRP2, NTM, NXN, OLFML2B, P3H1, P3H4,
P4HA3, P4HB, PALLD, PARVA, PDGFC, PDLIM7, PEA15, PERP, PKM, PLOD1, PLOD2, PMAIP1,
PMEPA1, PODNL1, POSTN, PRDX4, PRSS23, PTGER3, PTK7, PYCR1, RAB31, RAI14, RBM3, RCAN2,
RCN1, RCN3, RGCC, RGS3, RIN2, RNF144A, ROR2, RUNX2, SCARF2, SDC1, SEC13, SERPINH1, SFRP2,
SHISA5, SLC16A3, SLC38A5, SLC39A14, SMCO4, SMIM3, SMYD3, SNAI2, SPARC, SPATS2L, SPHK1,
SPON1, SSR3, STK17B, SUGCT, SULF1, SULF2, SYTL2, TAGLN, TENM3, TGFB1I1, TGFBI, THBS2,
THY1, TMEM119, TMEM263, TMEM45A, TNFAIP3, TOM1, TPM1, TPM4, TPST2, TSPO, TUBA1C,
TUSC3, UBTD1, UNC5B, VCAN, VGLL4, VOPP1

[0212] Furthermore, bulk RNA-seq of TCGA HNSCC samples were deconvoluted by using the HNSCC scRNA-seq data and applied the Bayesprim R package to investigate cell type-specific gene expression. The output of Bayesprism analysis is a cell type-specific gene expression count matrix from which fibroblast specific expression can be extracted. As shown in FIG. 1B, the expression of lncRNA candidates SEAL2, SEAL3, SEAL4, SEAL5, and SEAL6 were upregulated in the tumor fibroblast cell population compared to normal tissue fibroblasts, suggesting the possible role of the lncRNA candidates in tumor fibroblast cell populations.

[0213] For tissue specificity evaluation, the expression of lncRNA candidates was evaluated with the ENCODE project and GTEx portal data repositories of normal tissue types bulk RNA-seq. Gene expression was quantified using the tool featureCounts and normalized using the R package DESeq2. As shown in FIG. 1C, the expression of lncRNA candidates SEAL1, SEAL2, SEAL3, and SEAL6 in the induced CAFs was higher than the mean expression and the inter-quartile range (IQR) expression across the normal human tissues. This data suggested that lncRNA candidates SEAL1, SEAL2, SEAL3 and SEAL6 have low expression across normal tissues. Collectively, these analyses revealed SEAL1, SEAL9, SEAL2, SEAL3, SEAL4, SEAL5, SEAL6, and SEAL7 to be possible lncRNA candidates for further exploration of their involvement in CAFs.

### Example 2: Generation of TGF, and TGFβ+Starvation (COMB) Induced CAF Models

[0214] To characterize and investigate the function of the identified lncRNA candidates (e.g., SEAL1, SEAL9, SEAL2, SEAL3, SEAL4, SEAL5, SEAL6, SEAL7), as described in Example 1, an in vitro myofibroblast CAF (myCAF) model was established, as shown in FIG. 2A. Primary HDFs from healthy donors were obtained and cultured at 70-90% confluency in FGM-2 Fibroblast Growth Medium-2 BulletKit (Lonza) and were passaged 1-2 times/week using TrypLE Express (Gibco). All experiments were performed on low-passage HDFs (less than passage 5). For TGFβ and TGFβ+ starvation (COMB) induction, 100,000 HDFs were seeded in 6-well plates and were left to acclimate for 48 hours before induction. For TGFβ induction, cells were treated with 5 ng/ml TGFβ for 48 hours and then harvested for downstream analyses. For COMB induction, cells were treated with 5 ng/ml TGFβ in cell medium without fetal bovine serum (FBS) (starvation) for 48 hours before harvest. As shown in FIG. 2B, HDFs without induction, and with TGFβ or COMB induction were monitored at 12 hours, 24 hours, and 48 hours, and the fibroblasts were still viable with TGFβ or COMB induction.

[0215] Once a TGFβ/COMB induced model was established, gene expression of TGFβ/COMB induced CAFs was investigated by performing RNA-seq. RNAs (e.g., 500 ng) were extracted from control HDFs and TGFβ/COMB induced CAFs. With the extracted RNAs, polyA-enriched or Ribozero-depleted strand-specific libraries were prepared and sequenced on the Illumina NovaSeq 6000 PE150 at a depth of 40-200 million reads/sample. RNA-seq data were analyzed for differential gene expression. As shown in FIG. 2C, expression of several myofibroblast CAF (myCAF) gene markers, such as COL10A1, COL11A1, COL5A2, FAP, were upregulated compared to control, suggesting that the TGFβ/COMB was able to induce HDFs to myofibroblast CAFs. This finding was validated with RNAs from HDFs and TGFβ/COMB induced CAFs, reverse transcribed using the QuantiTect Reverse transcription kit (Qiagen), and subjecting the reverse transcribed RNAs to qPCR analysis. qPCR analysis was performed with TB Green Premix Ex Taq II (Tli RNase H Plus) (Takara) and specific TaqMan assays for myCAF gene markers, and control gene RPL30 to normalize expression values to account for differences in cDNA input. As shown in FIG. 2D and FIG. 2E, qPCR analysis showed that some expression of myCAF gene markers (e.g., COL11A1, COL5A1, LRRC15) are upregulated in TGFβ and COMB induced CAFs compared to control, respectively. As shown in FIG. 2M, expression of several myCAF gene markers, such as INHBA, COL11A1, MMP13, NNMT, LOXL3, PLOD2, TNC, ITGA11, COL5A1, COMP, COL1A1, FN1, LTBP2, COL10A1, NOX4, POSTN, CCN2 and LRRC15 were upregulated compared to control, suggesting that the TGFβ model was able to induce HDFs to myofibroblast CAFs. The upregulation of these markers in TGFβ induced CAFs, as compared to control, was validated by performing qPCR analysis of the myCAF gene markers COL11A1, TNC, ITGA11, COL5A1, POSTN, NOX4, PLOD2 and LTBP2, as shown in FIG. 2N. Singscore analysis with the myCAF signature (Table 13) confirmed that the expression of these genes was significantly enriched in TGFβ induced CAFs as compared to control HDFs, as shown in FIG. 2O. In addition, gene ontology analysis of upregulated protein-coding genes upon TGFβ induction were found to be associated with myCAF functions (e.g., extracellular matrix organization, mesenchyme development, axon guidance, and wound healing, muscle tissue development, connective tissue development, respiratory system development, bone development, ser family amino acid biosynthetic process, transmembrane receptor protein Ser/Thr kinase signaling pathway). Extracellular matrix organization was the top enriched (adjusted p-value of 1.36e−11) GO process. Of note, an enrichment of innervation processes (e.g. axon guidance pathways) and/or ECM dysregulation pathways are associated with aggressiveness, perineural invasion and outcome for some solid cancers and represent important CAF-driven pro-tumorigenic processes. Therefore, the GO pathway analysis further supported the in vitro model recapitulated the role of CAFs in tumor development.

[0216] Expression of lncRNA candidates were also analyzed with the RNA-seq data. As shown in FIG. 2F-2L, expression of SEAL1, SEAL2, SEAL3, SEAL4, SEAL6, and SEAL7 were upregulated in TGFβ and/or COMB induced CAFs compared to control, suggesting that the lncRNA candidates may modulate myCAFs.

[0217] Furthermore, snATAC-seq and snRNA-seq were performed with scramble control ASO (scrl ASO) transfected HDFs and in TGFβ induced CAFs. Briefly, 3 million of Scrl ASO transfected CTRL HDFs and TGF-β induced myCAFs were washed with PBS (Thermo Fisher), incubated in Swelling Buffer (10 mM Tris-HCl pH 7.5, 2 mM MgCl2, 3 mM CaCl₂)) for 5 min on ice, and then centrifuged at 700 g for 6 min at 4° C. Cells were resuspended in Lysis Buffer (10% v/v glycerol, 0.5% v/v NP40, 10 mM Tris-HCl pH 7.5, 2 mM MgCl2, 3 mM CaCl₂), 4 U/mL SUPERase (Thermo Fisher)), incubated for 8 min on ice, and then centrifuged at 700 g for 6 min at 4° C. Nuclei were resuspended in diluted Nuclei buffer (10× Genomics), targeting a recovery of 10,000 nuclei. Transposition, GEM generation, barcoding and sequencing library preparation was performed following the following manufacturer's instructions (Chromium Next GEM Single Cell ATAC Kit v2, PN-1000390, 10× Genomics). Libraries were sequenced on an Illumina NovaSeq S4, PE10×ATAC at a depth of 300 million reads per sample. For snRNA-seq, single nuclei preparations were barcoded using the 10× chromium platform (Single cell 3′ Reagent Kit v3, 10× Genomics). Post GEM-RT clean-up was performed on barcoded cDNA. 250 million reads/sample were sequenced on a NovaSeq 6000 (Illumina). snRNA-seq raw data was mapped to the GRCh38/hg38 reference genome assembly and processed using 10× Genomics CellRanger (v7.1.0).

[0218] Next, the snRNA-seq and snATAC-seq data were integrated to build gene regulatory networks (GRNs) using the R package scMEGA v1.0.1 (Li et al, scMEGA: Single-cell multi-omic enhancer-based gene regulatory network inference. Bioinformatics Advances 3(1), 2023). The integrated, pair snRNA/ATAC dataset was subjected to trajectory analysis to identify cell states. Identified transcription factors (TFs) were filtered based on correlation between TF binding activity (chromVAR) and TF expression along trajectories, and PCGs based on correlation between chromatin accessibility (ATAC signal) and expression along trajectories. This analysis identified 47 TFs associated with the TGF-β induced myCAF cell state, as measured by increased activity and expression. The 47 TFs include SREBF1, IKZF1, PITX1, XBP1, VDR, ZNF274, HOXA2, RELA, MZF1, PRRX2, RUNX3, TBX5, ZSCAN29, ZIC4, NR2C2, SPI1, ATF3, SOX4, GMEB2, ZNF740, HSF1, ZNF16, FIGLA, GATA6, ETV5, BCL6, KLF17, NFATC1, TEAD2, ATF4, GLIS3, SRF, RUNX1, TEAD2, GLI2, ZNF148, TBX15, LEF1, JUND, MYC, BACH2, FOX, RUNX2, SP2, EGR2, GLIS2, AND NFATC4. Some of these TFs, such as TEAD2, NFATC4, and RUNX1, was found to be expressed in HNSCC cancer progression model (described in Example 1), demonstrating the primary cancer myCAF specific activity of these TFs. As shown in the pseudotime plots of FIG. 22A, the TFs, such as TEAD2, RUNX2, RUNX1, and NFATC4 were also found to have increase in their expression, activity, and expression of positively associated TF regulon during the transition from HDFs to TGFβ induced CAFs. In particular, the TF activity and TF regulon expression displayed a clear correlation along the pseudo-time trajectory, while the TF expression showed a less clear correlation.

### Example 3: Characterization of SEAL1 in TGFβ Induced Cancer Associated Fibroblasts (CAFs)

[0219] To gain insight into the genomic SEAL1 locus, bam files from the bulk RNA-seq data of TGFβ induced CAFs were used to create coverage tracks using the BAMscale tool. The output BigWig files were averaged into Wig file tracks using Wiggletools, and finally bedGraphs files (positive and negative tracks) were created for visualization in the UCSC Genome Browser on GRCh38/hg38. As shown in FIG. 3A, SEAL1 is located on Chr3:194355288-194370349 on the sense strand, overlapping with some region of LRRC15 mRNA, transcribed in the opposite (anti-sense) orientation. Expression of SEAL1 was also upregulated in TGFβ induced CAFs compared to control. In addition, since H3K27ac is associated with gene activation, human colorectal cancer CAF and HDF H3K27ac ChIP-seq data were obtained and aligned to the GRCh38 genome using Bowtie2 program to observe H3K27ac marks in the SEAL1 region (FIG. 3A, bottom). Control HDFs and TGFβ induced CAFs were further analyzed by H3K27ac Cut&Run to detect active enhancer regions. For this, HDFs were cultured and treated as described in Example 2 and 48 hours later, 500,000 cells were used for EpiCypher CUTANA™ ChIC/CUT&RUN kit with H3K27ac antibodies. Libraries were prepared using the CUTANA™ CUT&RUN library prep kit and sequenced on a NovaSeq PE100 (Illumina) at 15 million reads depth. As shown in FIG. 3A, SEAL1 was linked to a H3K27ac marked genomic region (FIG. 3A, bottom).

[0220] As SEAL1 transcript is at least partially align with some region of the LRRC15 transcript, SEAL1-specific tagged primers and LRRC15-specific tagged primers were designed, as shown in FIG. 3B. The SEAL1 transcript was detected and distinguished from the LRRC15 transcript, using a targeted cDNA-qPCR approach. First, cDNA from control and TGFβ induced CAFs was synthesized using SEAL1 specific tagged primers. Next, qPCR amplification was conducted using the tag-specific primers (e.g., LRRC15-tag primers, SEAL1 tag primers). The amplification was normalized to a reference gene (e.g., GAPDH) that was amplified using the same approach with tagged primers. As shown in FIG. 3C, SEAL1-tag primers were able to amplify specifically SEAL1, compared to LRRC15-tag primers in both control and TGFβ induced CAFs, showing the specificity of the SEAL1-tagged primers to amplify and detect SEAL1. Using the SEAL1 primers, the increased expression of SEAL1 was detected in TGFβ induced CAFs compared to control, via qPCR, as shown in FIG. 3D.

[0221] To modulate SEAL1 expression in TGFβ induced CAFs and investigate the effect of SEAL1 knockdown, various antisense oligonucleotides (ASOs) were designed to target different regions of SEAL1 transcript as shown in FIG. 3F. Prior to transfecting the cells with the ASOs, expression levels of myCAF marker transcripts and SEAL1 transcript were measured in control and TGFβ induced CAFs via qPCR to establish baseline expression of these markers without ASO treatment, as shown in FIG. 3E. FIG. 3E also shows that some of the myCAF markers that were measured are part of the LRRC15 prognostic signature. The LRRC15 prognostic signature includes MMP11, C1QTNF3, COL11A1, CTHRC1, COL12A1, COL10A1, COL5A2, THBS2, AEBP1, LRRC15, and ITGA11, which are associated with poor patient outcome across cancer types. Next, primary HDFs were induced by TGFβ at the same time as transfection with ASOs. Briefly, 100,000 primary HDFs per well of 6-well plate were plated one day before transfection with SEAL1 ASOs or Scramble control ASO (Scrl). Right before ASO transfection, the cell medium was changed to medium containing 5 ng/ml TGFβ. ASOs were diluted in TE buffer to a working solution of 20 M and was mixed with OptiMEM medium and X-tremeGENE HP transfection reagent. The mixture was incubated at room temperature for minimum of 15 minutes, and then added dropwise to the cells at 100 l/well, with the total amount of 50 pmol ASO/well. Cells were harvested after 48 hours for RNA extraction and qPCR analysis. As shown in FIG. 4A-4I, qPCR was performed to investigate expression of SEAL1 and myCAF markers (LRRC15, COL5A2, COL11A1, COL12A1, CTHRC1, MMP11, PDPN, and FAP) upon transfection of SEAL1 ASOs versus Scrl. qPCR analysis showed that transfection of SEAL1_G2, SEAL1_G4, and SEAL1_G5 ASOs clearly reduced expression of SEAL1 compared to Scrl (FIG. 4A). Transfection of SEAL1_G2 ASO also resulted in statistically significant reduced expression of COL5A2 (FIG. 4C), COL12A1 (FIG. 4E), MMP11 (FIG. 4G), and PDPN (FIG. 4H). Transfection of SEAL1_G4 ASO resulted in statistically significant reduced expression of LRRC15 (FIG. 4B), COL5A2 (FIG. 4C), COL11A1 (FIG. 4D), FAP (FIG. 4I), and CTHRC1 (FIG. 4F). Similarly, transfection of SEAL1_G5 ASO resulted in statistically significant reduced expression of LRRC15 (FIG. 4B), COL5A2 (FIG. 4C), COL11A1 (FIG. 4D), COL12A1 (FIG. 4E), CTHRC1 (FIG. 4F), and PDPN (FIG. 4H). Furthermore, LRRC15 protein level after treatment of one of the SEAL1 ASOs and an LRRC15 ASO was investigated. As shown in FIG. 4J and FIG. 4K, LRRC15 protein level increased in response to TGFβ treatment, and the LRRC15 ASO successfully eliminated LRRC15 protein expression. Interestingly, the SEAL1 ASO achieved only a partially reduced LRRC15 protein level. These data showed that downregulation of SEAL1 expression by ASOs reduces the expression of myCAF markers in the presence of some retained LRRC15 protein, suggesting that SEAL1 may achieve this effect independently from LRRC15.

[0222] As transfection of SEAL1_G2, SEAL1_G4, and SEAL1_G5 ASOs resulted in the most decreased expression of SEAL1 and various myCAF markers, whether these ASOs affect cell viability was next investigated. As shown in FIG. 5, microscopic images were taken of HDFs after 48 hours of TGFβ induction and SEAL1 ASO transfection or Scrl. Transfection of Scrl, SEAL1_G4, or SEAL1_G5 ASOs resulted in high RNA yield and moderate to low toxicity, respectively, compared to SEAL1_G2 ASO, which showed relatively higher toxicity. Taken together, these data suggested that SEAL1_G4 and SEAL1_G5 ASOs have high efficiency and relatively low toxicity. To confirm such results, qPCR analysis, performed as described in Example 2, measuring expression of SEAL1 and myCAF markers (LRRC15, COL5A2, COL11A1, COL12A1, CTHRC1, MMP11, PDPN, and FAP) was conducted with TGFβ induced CAFs transfected with Scrl, SEAL1 G4, or SEAL_G5. Transfection of SEAL1_G4 and SEAL1_G5 ASOs lead to reduced expression of SEAL1 compared to Scrl (FIG. 6A). In addition, transfection of SEAL1_G4 and SEAL1_G5 ASOs lead to statistically significant reduced expression of LRRC15 (FIG. 6B), COL5A2 (FIG. 6C), COL11A1 (FIG. 6D), CTHRC1 (FIG. 6F), and FAP (FIG. 6I). Transfection of SEAL1_G5 ASO further lead to statistically significant reduced expression of COL12A1 (FIG. 6E), MMP11 (FIG. 6G), and PDPN (FIG. 6H).

[0223] RNA-seq was performed with TGFβ induced CAFs transfected with Scrl, SEAL1_G4, or SEAL1_G5. Similar to FIG. 6A, RNA-sequencing showed that transfection of SEAL1_G4, or SEAL1_G5 reduced expression of SEAL1 compared to Scrl. (FIG. 6J). With the RNA-seq data, gene expression patterns of TGFβ induced CAFs transfected with Scrl, SEAL1_G4, or SEAL1_G5 were analyzed using the signature myCAF gene set with Singscore, wherein a higher score indicates that the pattern of gene expression in a sample is concordant with the pattern in the myCAF signature gene set. As shown in FIG. 6K, TGFβ induced CAFs transfected with SEAL1_G4, or SEAL1_G5 showed decreased Singscore of myCAF signature gene set compared to Scrl, indicating that inhibition or downregulation of SEAL1 by ASO treatment reduced gene expression pattern of the myCAF signature gene set. Gene ontology enrichment analysis was also conducted with genes that were downregulated by both SEAL1_G4 ASO and SEAL1_G5 ASO treatment. Downregulated genes were enriched in myCAF-related functions, such as extracellular matrix structure organization (e.g., extracellular matrix organization, extracellular structure organization, external encapsulating structure organization), and regulation or activation of GTPase activity, suggesting the potential role of SEAL1 in CAF pro-tumorigenic function. TGFβ induced CAFs transfected with SEAL1_G4, SEAL1 G5, LRRC15_G1 (5′CCACTTAGTAATCAGC (SEQ ID NO: 2071)), LRRC15_G3 (5′CTGGGTTAAGATTGGC (SEQ ID NO: 2072)) or Scrl control ASO were evaluated after 48h for the expression of myCAF markers (PLOD2, TNC, NOX4, POSTN, COL5A1, LTBP2, ITGA11) by qPCR, as shown in FIG. 7K-7Q. qPCR analysis showed that transfection of SEAL1_G4 and SEAL1_G5 ASOs led to statistically significant reduced expression of PLOD2 (FIG. 7K), TNC (FIG. 7L), NOX4 (FIG. 7M), POSTN (FIG. 7N), COL5A1 (FIG. 7O), LTBP2 (FIG. 7P) and ITGA11 (FIG. 7Q) markers compared to Scrl. LRRC15_G3 ASO led to statistically significant reduced expression of TNC (FIG. 7L), NOX4 (FIG. 7M), POSTN (FIG. 7N), COL5A1 (FIG. 7O), LTBP2 (FIG. 7P) and ITGA11 (FIG. 7Q) compared to Scrl; however less significant than SEAL1 ASOs. LRRC15_G1 ASO led to statistically significant reduced expression of POSTN (FIG. 7N) and ITGA11 (FIG. 7Q) compared to Scrl. Furthermore, expression of the TEAD2, NFATC4 and RUNX1 TFs predicted target PCGs were also more downregulated upon transfecting TGF-β induced myCAFs with the SEAL1_G4 ASO, as compared to the LRRC15_G3 or non-targeting Scrl ASOs (FIG. 22B). Taken together, these results suggest that SEAL1 might have a stronger impact on myCAF markers than LRRC15.

[0224] RNA-seq was performed with TGFβ induced CAFs transfected with Scrl, LRRC15_GI and LRRC15_G3 ASOs, and FIG. 9A shows that transfection with LRRC15_G1 and LRRC15_G3 reduced expression of LRRC15 compared to Scrl. The RNA-seq gene expression patterns of TGFβ induced CAFs transfected with Scrl, SEAL1_G4, SEAL1_G5, LRRC15_GI or LRRC15_G3 were analyzed using the defined myCAF signature (Table 13) with Singscore, where a higher score indicates that the pattern of gene expression in a sample is concordant with the pattern in the myCAF signature. As shown in FIG. 9B, TGFβ induced CAFs transfected with SEAL1_G4 or SEAL1_G5 showed a decreased Singscore of the myCAF defined signature, as compared to Scrl and LRRC15_G1 or LRRC15_G3 ASOs. This suggests that SEAL1 has a stronger impact on the myCAF cell identity than LRRC15. Sub-cellular fractionation of TGFβ induced CAFs demonstrated that SEAL1 transcript was predominantly localized in the nucleus, suggesting a transcriptional regulatory role, while LRRC15 mRNA showed only a partial nuclear localization.

[0225] To further compare the effect of SEAL1 and LRRC15 ASOs on the myCAF cell identity, control HDFs transfected with Scrl ASO and TGFβ induced CAFs transfected with either Scrl ASO, SEAL1_G4 ASO or LRRC15_G3 ASOs were analyzed with single nuclei RNA-seq (snRNA-seq), which enables quantification of gene expression on single cell level. For this, around 3-7 million cells were harvested for each condition (HDF-Scrl ASO, TGFβ-Scrl ASO, TGFβ-SEAL1_G4 ASO, TGFβ-LRRC15_G3 ASO). For RNA extraction, 15% of cells/condition were put aside. 3 million cells/condition were used for nuclei isolation; the cell pellet was resuspended in 10 ml of swelling buffer and incubated for 5 min at 4° C. The supernatant was discarded and lysis buffer, including SUPERase RNAse inhibitor (Roche), was added to dissolve the cell pellet during 5 min incubation on ice. 30,000 cells/condition were used for snATAC-seq preparation. Single nuclei preparations were barcoded using the 10× chromium platform (Single cell 3′ Reagent Kit v3, 10× Genomics). Post GEM-RT clean-up was performed on barcoded cDNA. 250 million reads/sample were sequenced on a NovaSeq 6000 (Illumina). snRNA-seq raw data was mapped to the GRCh38/hg38 reference genome assembly and processed using 10× Genomics CellRanger (v7.1.0). The DropletQC method was used to calculate the nuclear fraction for each cell and based on the nuclear fraction and high UMI (unique molecular identifier) count, the top 15,000 nuclei were selected for further analysis. Quality control, clustering and data analysis was performed using the Seurat package, and a CellRanger index generated using the transcriptome assembly built for the TGFβ/COMB in vitro model. Expression of selected transcripts was quantified as log normalized expression values. As shown in FIG. 9C, SEAL1 expression was not detected in control HDFs (condition 1), while weak LRRC15 expression was detected. In the TGFβ induced CAFs (condition 2), SEAL1 expression was detected in a sub-population of the TGFβ induced CAFs (FIG. 9C, top left), whereas LRRC15 expression was detected in the entire population (FIG. 9C, top, right). Transfection with SEAL1_G4 ASO (condition 3) effectively removed the SEAL1 transcript (FIG. 9C, top left), but not all the LRRC15 transcript (FIG. 9C, top right). Transfection with LRRC15_G3 ASO (condition 4) effectively removed LRRC15 transcript. Singscore analysis with the defined myCAF signature confirmed that the expression of these genes was clearly induced in the TGFβ induced CAFs (condition 2) as compared to control HDFs (condition1), and markedly reduced in SEAL1_G4 transfected cells (condition 3), respectively (FIG. 9C, bottom left). The signature was not reduced, however, in LRRC15_G3 transfected cells (condition 4, FIG. 9C, bottom left). The defined myCAF signature was confirmed by pseudobulk quantification to be reduced with the SEAL1_G4 ASO (hSEAL1_G4) and not with the LRRC15_G3 ASO (hLRRC15_G3) (FIG. 9C, bottom right side violin plot). These results support the notion that SEAL1 may have a larger impact on the myCAF cell identity than LRRC15.

[0226] To investigate the expression of SEAL1 and LRRC15 during HNSCC cancer progression in a scRNA-seq dataset (Choi et al, Single-cell transcriptome profiling of the stepwise progression of head and neck cancer, Nature Communications 14(1), 2023), the SEAL1 lncRNA and LRRC15 mRNA transcripts were quantified using the MAGIC algorithm (Van Dijk et al, Recovering gene interactions from single-cell data using data diffusion. Cell 174(3), 2018) in the FBs of each sample condition (normal tissue, pre-cancerous leukoplakia and primary cancer). As shown in FIG. 9D, SEAL1 lncRNA was only expressed in primary cancer FBs, corresponding to the FB sub-cluster 3 myCAFs (FIG. 9D, top), while LRRC15 mRNA was expressed in leukoplakia FBs as well as primary cancer FBs (FIG. 9D, bottom). This suggests that SEAL1 may be more specific for the fully activated myCAF cell state (in primary cancer FBs) than LRRC15. An independent HNSCC scRNA-seq dataset (Puram et al, Single-cell transcriptomic analysis of primary and metastatic tumor ecosystems in head and neck cancer. Cell 171(7), 2017) analyzed in Example 1 also validated the expression of SEAL1 and LRRC15 in sub-cluster of fibroblasts that represent fully differentiated myCAF cell state. Furthermore, since triple-negative breast cancer (TNBC) is another solid tumor type with a recognized myCAF component, a TNBC bulk RNA-seq dataset (Jiang et al, Genomic and Transcriptonic Landscape of Triple-Negative Breast Cancers: Subtypes and Treatment Strategies. Cancer Cell 35(3), 2019) was queried for SEAL1 and LRRC15 expression. Both SEAL1 and LRRC15 were expressed in tumor samples (n=119) and not in normal tissue (n=20) samples. To further confirm SEAL1 expression on the single cell level, a single nuclei RNA-seq (snRNA-seq) dataset on 33 patients from the Human Tumor Atlas Network (HTAN) consortium was analyzed. SEAL1 and LRRC15 were detected in a sub-population of fibroblasts that also expressed the in-house defined myCAF signature as well as the SEAL1 module signature. These results showed that SEAL1 may be expressed in a similar myCAF population, without expression in normal tissue or leukoplakia FBs, as was confirmed in HNSCC (FIG. 9D). In contrast, LRRC15 displayed a weak expression some of the normal tissue FBs and clear induction in leukoplakia FBs. LRRC15 was also found to be expressed in primary cancer FBs, however less than in leukoplakia FBs. While SEAL1 and LRRC15 both displayed a CAF-associated expression pattern, SEAL1 appeared to surpass LRRC15 with regards to primary cancer myCAF specificity.

[0227] For analysis of SEAL1_G4 and LRRC15_G3 ASO dose-response, TGFβ induced CAFs were transfected as described above with 0, 0.5, 1, 5, 10 and 25 nM SEAL1_G4, LRRC15_G3 ASOs or control Scrl ASOs. RNA was extracted and analyzed by RNA-seq. The SEAL1_G4 and LRRC15_G3 ASOs dose response RNA-seq analysis was done using the R package drc (dose-response curves), giving the IC₅₀ ASO concentration for the target expression (achieving the half maximal inhibitory effect) and the RC₅₀ ASO concentration for the expression of downstream targets (achieving half reduction in expression level). Statistical significance was calculated by t-test between data and model. As shown in FIG. 9E-9G, bulk RNA-seq analysis was performed to investigate the expression of SEAL1, myCAF markers and myCAF signature gene set (Table 13) upon transfection with SEAL1_G4 versus Scrl. RNA-seq analysis showed that SEAL1 expression displayed a statistically significant ASO dose response reduction, with an IC₅₀ ASO concentration determined to be 4.65 nM, indicating a high efficacy of the SEAL1_G4 ASO (FIG. 9E). Transfection of the SEAL1_G4 ASO also caused a statistically significant ASO dose response reduction in the expression of the myCAF markers LRRC15, FAP, CTHRC1, POSTN, LTBP2, with RC₅₀ values determined to be 4.89 nM for LRRC15, 4.83 nM for FAP, 3.42 nM for CTHRC1, 3.98 nM for POSTN, and 4.99 nM for LTBP2 (FIG. 9F and FIG. 9S). Decreasing trend in the expression of TNC and COL5A1 was observed with varying dosage of SEAL_G4 ASO (FIG. 9S). Similarly, Singscore calculation of the myCAF signature set also displayed a statistically significant ASO dose response reduction to the SEAL1_G4 ASO transfection, with an RC₅₀ of 4.99 nM (FIG. 9G). A lower Singscore value of the myCAF signature corresponds to a lower expression, as determined by RNA-seq analysis. As shown in FIGS. 9H-9J, bulk RNA-seq analysis was performed to investigate the expression of LRRC15, myCAF markers and myCAF signature gene set upon transfection with LRRC15_G3 versus Scrl. RNA-seq analysis showed that LRRC15 expression displayed a statistically significant ASO dose response reduction, with an IC₅₀ ASO concentration determined to be 1 nM, indicating a high efficacy of the LRRC15_G3 ASO (FIG. 9H). Transfection of the LRRC15_G3 ASO caused a statistically significant ASO dose response reduction in the expression of the myCAF marker POSTN, with an RC₅₀ value of 2.97 nM (FIG. 9I). The expression of SEAL1 and the other myCAF markers FAP and CTHRC1 was reduced but did not show a dose response reduction to the LRRC15_G3 ASO (FIG. 9I). Similarly, Singscore calculation of the myCAF signature showed a minor reduction, but not a dose response reduction to the LRRC15_G3 ASO (FIG. 9J). Taken together, these results suggest that the myCAF markers, and the myCAF signature, are reduced in direct response to the SEAL1_G4 ASO, but not to the LRRC15_G3 ASO. The RNA-seq analysis of TGFβ induced CAFs transfected as described above with 0, 0.5, 1, 5, 10 and 25 nM SEAL1_G4 ASO was then analyzed to define a gene signature that displays a dose response to the SEAL1_G4 ASO. An RNA-seq dose response cluster analysis was performed, using unbiased hierarchical clustering (k=7), to identify gene clusters showing SEAL1_G4 ASO dose responsive changes in expression (FIG. 9K). 7 gene clusters that displayed gene expression changes upon SEAL1_G4 ASO transfection were identified: clusters 7 (n=90), 1 (n=790 genes), 3 (n=4598) and 5 (n=3180) were upregulated, while clusters 2 (n=3833), 4 (n=1704) and 6 (n=526) were downregulated (FIG. 9K, left). The Cluster 6 genes (n=526) showed the strongest downregulation in response to SEAL1_G4 ASO and was referred to as the SEAL1 Target Engagement panel (SEAL1 TEP, Table 14). Singscore analysis of the SEAL1 TEP demonstrated a significant SEAL1_G4 ASO dose responsive reduction with an RC₅₀ value of 4.4 nM (FIG. 9K, right). Gene ontology enrichment analysis was conducted with the SEAL1 TEP signature genes (n=526, Table 14) that displayed SEAL1_G4 ASO dose responsive reduction. The SEAL1 TEP genes were enriched in myCAF-related functions, such as neuron projection development, axon development, semaphorin-plexin signaling pathway, collagen-containing extracellular matrix, extracellular matrix structural constituent, suggesting the potential role of SEAL1 in CAF pro-tumorigenic functions. In particular, neurodevelopmental and axonogenesis pathways have been described to be CAF-related features involved in innervation of the TME, a process linked to perineural invasion and poor patient prognosis. To investigate the expression of the SEAL1 TEP during HNSCC cancer progression, the SEAL1 TEP was analyzed by Singscore in all FB sub-clusters (FIG. 9L, top left) of the HNSCC human patient samples. As shown in FIG. 9L, the fibroblast sub-cluster with the highest (meaning higher expression) SEAL1 TEP score (FIG. 9L, top right) is the same fibroblast sub-cluster that displays expression of the SEAL1 lncRNA (FIG. 9L, top middle), and corresponds to the fibroblast sub-cluster which constitutes the myCAFs (FIG. 9L, top left). FIG. 9L bottom left and bottom right similarly show a FB-specific hSEAL1 module linked to myCAF pathways that displayed specific expression in primary cancer myCAFs. To validate the association of SEAL1 with pro-tumorigenic functions, a high dimensional weighted gene co-expression network analysis (hWGCNA) was performed using the HNSCC cancer progression scRNA-seq dataset (Choi et al, Single-cell transcriptome profiling of the stepwise progression of head and neck cancer, Nature Communications 14(1), 2023). This analysis identified gene modules that have a similar expression pattern in an unbiased manner, considering the expression of all protein-coding genes present, and the expression of CAF lncRNAs (Table 10) in all cells of the dataset. The analysis identified 41 fibroblast-specific co-expression modules, whereof one of them (module M1) contained SEAL1, LRRC15, SEAL9 and 177 PCGs. The SEAL1 module signature (n=177) was enriched in myCAF-related functions such as extracellular matrix organization, ECM-receptor interaction, collagen formation, synapse organization and TGFβ signaling pathway, similar to the SEAL1 TEP pathway analysis. An unbiased analysis based on human HNSCC patient samples thus confirmed the association of SEAL1 with fibroblast-specific co-expression networks, and specific CAF pro-tumorigenic pathways involving ECM dysregulation and tumor innervation. As shown in FIG. 9M, Singscore analysis showed that the SEAL1 module (n=177) is reduced upon transfecting TGFβ induced CAFs with SEAL1_G4 ASO (FIG. 9M, left), as compared to control Scrl ASO transfection (FIG. 9M, left). Transfection with LRRC15_G3 ASO (FIG. 9M, left) did not reduce the signature. This result suggests that the expression of the SEAL1 module depends on SEAL1, rather than LRRC15. Singscore analysis of the HNSCC disease progression dataset also showed that the SEAL1 module (n=177) was expressed in primary cancer FBs that correspond to the myCAF sub-cluster (FIG. 9M, right).

[0228] An independent HNSCC scRNA-seq dataset was used to validate the abilities of the myCAF signature and SEAL1 expression to identify prognostically relevant myCAFs. FB sub-clustering identified three clusters, 0, 1 and 2, whereof sub-cluster 1 expressed SEAL1. Singscore analysis of the myCAF signature and SEAL1 co-expression module confirmed the SEAL1-expressing sub-cluster 1 to represent the fully differentiated myCAF cell state, corresponding to the sub-cluster 3 identified in the HNSCC cancer progression dataset. The cell type and FB sub-cluster information was used to deconvolute the TCGA-HNSC patient cohort, partitioning the patients based on having a high or low sub-cluster 1 myCAF fraction content, respectively (FIG. 21B). The sub-cluster 1 myCAF fraction—high patient category was associated with significantly (p=0.02) worse OS as compared to sub-cluster 1 myCAF—low patient category, similarly to the HNSCC cancer progression dataset sub-cluster 3 myCAF fraction survival analysis (FIG. 21A). This finding validates the association of the myCAF signature, and SEAL1 expression, with myCAFs of prognostic value.

[0229] To verify that the effect of ASO-mediated SEAL1 targeting was independent from LRRC15, LRRC15 was depleted by the clustered regularly interspaced short palindromic repeats—inhibition (CRISPRi) technique. To enable a prolonged HDF culturing required for the CRISPRi experiment, primary HDFs cultured, as described in Example 2, and at 50% confluency were transfected with 1 l SV40 viral supernatant (ALSTEM) and 4 l TransPlus reagent (ALSTEM) in antibiotic-free FGM-2 medium to generate an immortalized HDF cell line (iHDF). Medium was changed to complete FGM-2 medium the next day and 48 hours after transfection the cells were selected with 1 g/ml Puromycin (ThermoFisher) during 10 days. After 10 days of Puromycin selection, the medium was replaced with complete FGM-2 medium. Next, dCAS9-iHDF cells were generated by transfecting the iHDF line with lentiviral hCMV-Blast-dCas9-SALL1-SDS3 particles (Horizon Discovery) at an MOI of 0.3 with 4 μL TransPlus reagent. Medium was changed the next day with fresh antibiotic-free FGM-2 medium and 48h after transfection the cells were selected with 4 □g/ml Blasticidin (Fisher Scientific) during 10 days. After 10 days, the medium was replaced with complete FGM-2 medium. Guide RNAs (sgRNAs) targeting the LRRC15 transcription start site were designed using CRISPick design module from the Broad institute, cloned into the CRISPRi lentiviral non-targeting control plasmid (Horizon Discovery) and used to generate viral particles together with packaging plasmids (Trono lab) in HEK293 cells. The following sgRNAs were used for the annotated LRRC15 transcriptional start site (TSS): TSS_G2 (5′TCAAGGCTGCAGCATGAGTG (SEQ ID NO: 2073)), TSS_G4 (5′GGAGCCTGAGAGGAGGACGA (SEQ ID NO: 2074)), TSS_G5 (5′GTGGCTCGCCTAAGCTGTCC (SEQ ID NO: 2075)), TSS_G6 (5′GTACCCTGTAGTGTCAGCCC (SEQ ID NO: 2076)), TSS_G8 (5′GCCGGGCCCTCTAAGCAGAG (SEQ ID NO: 2077)) and TSS_G9 (5′GGTCCAGCAGAAATGGGAAG (SEQ ID NO: 2078)), and for the alterative TSS: alt_TSS_GI (5′GGGCGGGCTCAGCAGTGATG (SEQ ID NO: 2079)) and alt_TSS_G3 (5′AGGTAGAATAGATCCAGCCG (SEQ ID NO: 2080)). To generate lentiviral particles with sgRNA plasmids, HEK cells were transfected with packaging plasmids psPAX2 and pMD2.G, and one unique sgRNA plasmid, per well using the X-tremeGENE HP DNA Transfection Reagent (Roche) in Optimem medium during 4h. 4h after transfection, the medium was replaced with complete FGM-2 medium, and 24h later, the medium was collected as viral supernatant, filtered through a 40 μm strainer and stored at −80° C.. The dCAS9-iHDF cell line was transduced using 4 μL TransPlus reagent in complete FGM-2 medium with viral particles carrying the sgRNAs targeting LRRC15, versus non-targeting sgRNAs. Medium was changed the next day. The cells were then induced by TGFβ and transfected with SEAL1_G4 versus control Scrl ASOs, as described above. Cells were harvested 48h after ASO transfection for RNA-seq and western blot analysis, and RNA was extracted, as described above. As shown in FIGS. 9N-9P, bulk RNA-seq analysis was performed to investigate the effect of ASO-mediated SEAL1-targeting independent from LRRC15. For this, non-TGFβ induced (control) dCAS9-iHDF cells were transfected with non-targeting sgRNA plus non-targeting Scrl ASO. TGFβ-induced dCAS9-iHDF cells were transfected with either non-targeting sgRNA plus Scrl ASO (TGFβ control), with LRRC15-targeting sgRNA plus Scrl ASO (LRRC15 depletion only), with non-targeting sgRNA plus SEAL1_G4 ASO (SEAL1 depletion only) or with LRRC15-targeting sgRNA plus SEAL1_G4 ASO (depletion of both LRRC15 and SEAL1). The LRRC15-targeting sgRNAs effectively reduced LRRC15 expression 83% (FIG. 9N), compared to non-targeting sgRNAs plus Scrl ASO (FIG. 9N). The LRRC15-targeting sgRNAs plus SEAL1_G4 ASO also effectively reduced SEAL1 expression in TGFβ induced cells, compared to non-targeting sgRNAs plus Scrl ASO (FIG. 9R) in TGFβ induced cells. The LRRC15+ myofibroblast marker signature (Buechler et al, Cross-tissue organization of the fibroblast lineage. Nature 593 (7860), 2021) score was also significantly reduced in TGFβ induced cells treated with both LRRC15-targeting sgRNAs plus SEAL1_G4 ASO compared to TGFβ induced cells treated with non-targeting sgRNA plus Scrl ASO. Of note, this signature was not reduced in TGFβ induced cells treated with LRRC15-targeting sgRNAs plus Scrl ASO, meaning that these markers responded to SEAL1 depletion rather than LRRC15 depletion. The myCAF markers COL11A1, CTHRC1, COL5A2 and ITGA11 were effectively reduced only when the cells were also transfected with the SEAL1_G4 ASO (FIG. 9O). In the cells with LRRC15 depletion only, meaning transfection with LRRC15-targeting sgRNA plus Scrl ASO, the markers only showed a minor reduction (FIG. 9O). Moreover, few genes were differentially expressed in cells with LRRC15 depletion only compared to treatment with non-targeting sgRNAs plus Scrl ASO. Only two gene ontology pathways were enriched among the downregulated protein coding genes, of which only one was associated with myCAF function (e.g., collagen fibril organization pathway). Several pathways were identified among the genes upregulated by depletion of LRRC15, but were associated with immune response functions such as response to bacterium and cytokine production. This suggested that LRRC15 may be related to cellular functions that are unrelated to myCAF tumor-supportive mechanisms. Similarly, Singscore of the myCAF marker signature (Table 13), showed that only the cells with depleted SEAL1, meaning transfection with non-targeting sgRNA plus SEAL1_G4 ASO (SEAL1 depletion only) or with LRRC15-targeting sgRNA plus SEAL1_G4 ASO (depletion of both LRRC15 and SEAL1), significantly reduced the myCAF signature score (FIG. 9P). The cells with LRRC15 depletion only did not reduce the myCAF signature. Taken together, these results demonstrated that SEAL1-targeting reduced myCAF marker expression independent from LRRC15 expression level, and that LRRC15-targeting only did not reduce myCAF marker expression.

[0230] As shown in FIG. 9Q, western blot analysis to detect the LRRC15 protein was performed. Around 200,000 cells from each condition were collected and lysed in 70 μl RIPA buffer (1×: 50 mM Tris-HCl pH 8, 150 mM NaCl, 1% NP40, 0.5% NaDOC, 0.1% SDS) supplemented with 1× protease inhibitor (Sigma) and incubated 30 minutes on ice. The cell lysates were centrifuged 15 min at 13,000 rpm and 4° C. and the protein content measured in the supernatant using the Pierce BCA kit (ThermoFisher). Protein electrophoresis was performed in NuPAGE™ 12% Bis-Tris gels and MOPS SDS Running Buffer (20×) (ThermoFisher), with 10 μg of protein from each sample. Blotting was performed using the iBlot2 transfer system and nitrocellulose membranes (ThermoFisher). Proteins detection was performed using anti-LRRC15 (ab150376, Abcam) or anti-GAPDH antibody (ab8245, Abcam) primary antibodies, HRP-conjugated secondary antibodies (anti-mouse, ThermoFisher, anti-rabbit, CellSignal) and the SuperSignal™ West Femto Maximum Sensitivity Substrate (ThermoFisher). Proteins were visualized with an Amersham ImageQuant™ 500 CCD imaging system (Cytiva) and quantified relative the control GAPDH with ImageJ. The conditions analyzed were the following: control dCAS9-iHDF cells or TGFβ-induced dCAS9-iHDF cells transfected with non-targeting Scrl ASO, with LRRC15-targeting sgRNA plus Scrl ASO (LRRC15 depletion only), with non-targeting sgRNA plus SEAL1_G4 ASO (SEAL1 depletion only) or with LRRC15-targeting sgRNA plus SEAL1_G4 ASO (depletion of both LRRC15 and SEAL1). The LRRC15 protein was effectively reduced in cells with LRRC15 depletion only (FIG. 9Q). The cells with SEAL1 depletion only (FIG. 9Q) also reduced LRRC15 protein levels; however less than with LRRC15 depletion only or depletion of both LRRC15 and SEAL1. These results demonstrated that SEAL1 reduced the myCAF marker signature (FIG. 9P), independent from LRRC15 protein expression.

[0231] Since there are overlapping SEAL1 and LRRC15 regions on opposite strands (e.g., antisense transcription orientation), the effect of LRRC15 knockdown on myCAF expression was investigated to see if SEAL1 or LRRC15 regulate expressions of myCAF markers. Different ASOs against LRRC15 were designed as shown in FIG. 7A. LRRC15_G1-G4 were designed in the exonic and intronic regions of LRRC15, and LRRC15_G5-G8 were designed in the upstream regulatory region. HDFs were induced with TGFβ and then transfected with LRRC15 ASOs, using the same protocol as with SEAL1 ASOs. Transfected cells were harvested for RNA extraction and subsequent qPCR analysis, performed as described in Example 2, was performed with myCAF markers (LRRC15, COL5A2, COL11A1, COL12A1, CTHRC1, MMP11, PDPN, and FAP). As shown in FIG. 7C, expression of LRRC15 was reduced with transfection of all LRRC15 ASOs. However, as shown in FIGS. 7D-7J, only LRRC15_G2 led to statistically significant reduced expression of some myCAF markers (e.g., COL5A2, COL11A1, COL12A1, CTHRC1, and FAP) compared to Scrl. This is different from what was seen with SEAL1 ASOs, suggesting that SEAL1 may regulate myCAF markers more than LRRC15. Interestingly, as shown in FIG. 7B, expression of SEAL1 was increased with LRRC15_G3, implying a possible co-regulatory mechanism, such as by lncRNA-mRNA interaction, lncRNA-protein interaction, or lncRNA-DNA interaction.

[0232] To check whether cell viability was affected by transfection of LRRC15 ASOs, microscopic images of HDFs were taken after 48 hours of TGFβ induction and LRRC15 ASO transfection or Scrl. As shown in FIG. 8, transfection with Scrl, LRRC15_G1, or LRRC15_G3 displayed low toxicity, as compared to LRRC15_G2.

[0233] Additional functional genomics methods, such as PRO-Cap analysis to map SEAL1 and LRRC15 transcription initiation upon HDF induction and Cut&Run analysis to map chromatin activation marks (e.g., H3K27ac) upon HDF induction is performed to understand the potential co-regulatory interaction and mechanism between LRRC15 and SEAL1.

[0234] The expression of SEAL2, SEAL3 and SEAL4 was investigated in the human HNSCC cancer progression model described in Example 1 (Choi et al, Single-cell transcriptome profiling of the stepwise progression of head and neck cancer, Nature Communications 14(1), 2023). The SEAL2, SEAL3 and SEAL4 lncRNAs were quantified with MAGIC algorithm (Van Dijk et al, Recovering gene interactions from single-cell data using data diffusion, Cell 174(3), 2018) in the FBs of each sample condition (normal tissue, pre-cancerous leukoplakia and primary cancer). As shown in FIG. 19, the SEAL2 lncRNA showed some expression in normal tissue FBs, but higher expression in primary cancer FBs (FIG. 19, top), in the FB sub-cluster that corresponds to sub-cluster 3 myCAFs. The SEAL3 and SEAL4 lncRNAs are only expressed in primary cancer FBs, in the FB sub-cluster that corresponds to sub-cluster 3 myCAFs (FIG. 19, middle and bottom). This suggests that SEAL3 and SEAL4 are specific for the fully activated myCAF cell state in HNSCC primary cancer. Then, to quantify lncRNA candidates in pancreatic ductal adenocarcinoma (PDAC), scRNA-seq raw data from 24 PDAC patients (Peng et al, Single-cell RNA-seq highlights intra-tumoral heterogeneity and malignant progression in pancreatic ductal adenocarcinoma, Cell Research 29(9), 2019) were obtained and analyzed as in Example 1 to annotate cell types, identify FBs and sub-cluster FBs. FB sub-clustering identified 6 clusters. The FB sub-cluster 1 was annotated to be myCAF-like based on gene set enrichment of the myCAF signature (Table 13) using the Singscore package. The SEAL2, SEAL3 and SEAL4 lncRNAs were quantified with MAGIC algorithm (Van Dijk et al, Recovering gene interactions from single-cell data using data diffusion, Cell 174(3), 2018) in the FBs. The SEAL2 and SEAL3 lncRNAs were only expressed in the cells that correspond to cluster 1 myCAFs. The SEAL4 lncRNA was expressed in the cluster 1 myCAFs, but also in other FBs. This suggests that SEAL2 and SEAL3 are specific for the fully activated myCAF cell state in PDAC primary cancer.

TABLE 14
The SEAL1 Target Engagement Panel (SEAL1 TEP)
Gene name

ABHD2, ABTB2, ACSL1, ACSS2, ADAM12, ADAMTS3, ADAMTS9, ADAMTSL1, ADCK1, AFF3, AGAP1,
ALKBH3, ANKIB1, ANKRD44, ANO1, ANO6, AP3B1, ARHGAP24, ARHGAP26, ARHGAP6, ARL5A, ASCC3,
ASTN2, ATAD2B, ATF2, ATG7, ATP6V1H, BBS4, BBS5, BBS9, BCAS3, BCR, BMERB1, BMPR1B, BNC2,
BNIP3L, BTBD11, BZW1, BZW1P2, C12orf56, C18orf54, CACNA1C, CACNA2D1, CADPS2, CAP2, CARMIL1,
CCBE1, CCDC3, CCDC91, CCN4, CCNT2-AS1, CDH11, CDH4, CDK5RAP2, CDKAL1, CENPBD1P1, CENPP,
CEP112, CERS6, CH25H, CHCHD3, CHCHD6, CHST11, CHST6, CHSY3, CLOCK, CLSPN, CMSS1, CNKSR2,
CNTN1, COA1, COL11A1, COL15A1, COL24A1, COL7A1, COL8A1, COLEC12, CRYBG1, CSMD2, CTSC,
CUEDC1, CWC27, DDAH1, DDX10, DELEC1, DENND1A, DENND1B, DEPDC1, DIAPH2, DIAPH3, DNAH1,
DNAJC1, DNHD1, DOCK4, DOK6, DPP4, DPP9, DPP9-AS1, DPYD, DPYSL3, DTWD2, DYNC2H1, ECE1,
EEFSEC, EFHD1, EHBP1, EIF4EBP3, ELP3, EML1, ENO1P4, ENOX1, ENPP1, ENSG00000174977,
ENSG00000187951, ENSG00000213204, ENSG00000224407, ENSG00000226833, ENSG00000227992,
ENSG00000228470, ENSG00000230928, ENSG00000232176, ENSG00000242474, ENSG00000251569,
ENSG00000253106, ENSG00000254192, ENSG00000258864, ENSG00000258881, ENSG00000258892,
ENSG00000260482, ENSG00000260578, ENSG00000260917, ENSG00000261130, ENSG00000261448,
ENSG00000261512, ENSG00000263276, ENSG00000267127, ENSG00000267904, ENSG00000268790,
ENSG00000269044, ENSG00000273373, ENSG00000276012, ENSG00000278893, ENSG00000279415,
ENSG00000280202, ENSG00000280206, ENSG00000282057, ENSG00000282936, ENSG00000283228,
ENSG00000283563, ENSG00000284906, ENSG00000284946, ENSG00000285547, ENSG00000285577,
ENSG00000286104, ENSG00000288646, EPG5, EPHB1, EPS15, EVI5, EXOC4, EXOC6B, F2RL1, FAF1, FAM126A,
FAM168A, FAM172A, FAM184B, FAM20A, FAM20C, FAM24B, FANCB, FANCC, FANCE, FAT3, FBN1, FBN2,
FBXL17, FBXL7, FBXO9, FER, FGF14, FGGY, FMNL2, FNDC3B, FOXO1, FOXS1, FRMD5, FSBP, FTO, GAB1,
GALK2, GALNT10, GALNT13, GAS7, GLIS1, GLYCTK, GMDS, GMDS-DT, GNG12, GOLGA4, GPATCH8, GPC6,
GPHN, GRIN2D, GSR, GSTM3, HAUS7, HBS1L, HDAC8, HERC4, HES1, HLCS, HMCN1, HMMR, HYDIN2,
IGF1R, IGF2BP2, IL15, IL1R1, IMMP2L, INHBE, INSYN2B, INTS7, INVS, ISLR2, ITGA10, ITGB3BP, ITGBL1,
JAZF1, JPX, KATNAL1, KATNB1, KCNJ6, KCNK9, KCNMB3, KIAA0753, KIAA1549L, KIF16B, KIF26B, KIFAP3,
KIRREL3, KIZ, KLF12, KLHL29, KMT2C, KMT5B, LAMA4, LARGE1, LARS2, LDB2, LDLRAD3, LDLRAD4,
LIN9, LINC00607, LINC00894, LINC01655, LINC02257, LIPG, LPP, LRBA, LTBP1, LYPLA1, MAGI1, MAMDC2,
MAML2, MAML3, MAP4, MAP7, MAPKAP1, MARCHF7, MAST2, MATN2, MBIP, MBOAT1, MCM4, MDFI,
MDFIC, ME3, MED23, MEIS2, METTL15, MGMT, MIATNB, MICU1, MINAR1, MIR711, MITF, MLLT3, MNAT1,
MRPL48, MSC-AS1, MSRA, MTX2, N4BP2, N4BP2L2, NAALADL2, NALF1, NAXD, NBAS, NCAM1, NCAM2,
NCOA3, NCOA7, NCOR1, NCS1, NDE1, NEGR1, NES, NETO1, NFATC3, NFIB, NGF-AS1, NHS, NHSL2, NINL,
NOL10, NSF, NSFP1, NSL1, NTM, NTN1, NTNG1, NTSR1, NUFIP2, OGFOD2, OMD, OPCML, OSMR, PACS1,
PAICS, PAIP1, PALS2, PAPPA2, PARD3B, PARP4, PCBP3, PDE1C, PDE3B, PDIA4, PGBD5, PHKA2, PICALM,
PKNOX2, PLCB1, PLCL1, PLS3, PLXNA1, PLXNA4, PLXNC1, PNMA2, POLA1, POLN, PORCN, PPIP5K2,
PPM1L, PPP1R12B, PPP1R21, PPP4R3B, PPP6R3, PRC1, PRC1-AS1, PRDM6, PRKCA, PRKG1, PRRC2C, PSD3,
PSMD1, PTPN14, PTPRD, PTPRG, PTPRM, R3HDM1, RAB43, RAB43P1, RABGAP1L, RAD18, RAD51B,
RALGPS1, RAMP1, RBFA, RBM33, RBMS3, RCAN2, RFX3, RGS17, RGS5, RGS7, RIC1, RNF216, RNLS, ROS1,
RPL24P8, RPS6KA3, RSU1, RTKN2, SCARF2, SCART1, SCD5, SCFD2, SCN9A, SEL1L3, SEMA3A, SEMA3C,
SEMA5A, SENP8, SGCD, SGCG, SHROOM4, SHTN1, SIL1, SIPA1L1, SLC10A7, SLC11A2, SLC13A3, SLC16A7,
SLC1A2, SLC1A3, SLC2A13, SLC35A1, SLC35E3, SLC35F6, SLC38A4, SLC39A11, SLC39A8, SLC45A4,
SLC46A3, SLC7A11, SLC9A9, SLCO3A1, SLIT3, SLIT3-AS2, SLK, SMARCA2, SMIM7, SNTB1, SORBS1,
SORCS2, SPATA21, SPC25, SPOCK1, SPON1, SRP19, SRPX, SSBP2, SSC5D, ST6GAL2, STK3, STRN, STX8,
STXBP5, SUCLA2, SULF2, SUPT3H, SVEP1, SYNDIG1, SYNJ2, TATDN1, TBC1D1, TBC1D3C, TBC1D3D,
TBC1D3L, TBC1D5, TBC1D8, TBC1D9, TBCK, TCP11L2, TENM2, TENM3, TENM4, TET2, TEX261, THAP4,
THSD4, TMCO4, TMED5, TMEM117, TMEM168, TMEM198B, TMTC2, TMX2, TNC, TNS1, TPK1, TRAF3,
TREX2, TRHDE, TRIL, TRIM6, TRIM66, TSHZ2, TSHZ3, TSPAN9, TTC28, TTF2, TUB, TULP4, UBAC2, UBE2E1,
UBE2E3, UMAD1, USP25, UTRN, VCAN, VCAN-AS1, VEPH1, VPS13B, WARS2, WDPCP, WDR25, WDR59,
WDR70, WIF1, WNT7B, XYLT1, YKT6, ZCCHC4, ZHX2, ZMYND11, ZNF277, ZNF407, ZNF654, ZNF704,
ZNF714, ZRANB3, ZRSR2P1, ZSCAN5A

### Example 4: Characterization of SEAL2 in COMB Induced CAFs

[0235] Using the procedure as described in Example 3, genomic locus transcribing SEAL2 was determined. As shown in FIG. 10A, SEAL2 is located in chr6:74958809-75026433 on the anti-sense strand, near a CAF-related protein coding gene, COL12A1. Expression of SEAL2 was upregulated in COMB induced CAFs compared to control. Furthermore, a primary CAF super-enhancer (SE) region was identified upstream of SEAL2, as assessed by the Rank Ordering of Super-Enhancers (ROSE) algorithm and visualized on the genome browser. In addition, since H3K27ac is associated with gene activation, human colorectal cancer CAF and HDF H3K27ac ChIP-seq data were obtained and aligned to GRCh38 genome using Bowtie2 program to observe H3K27ac marks in the SEAL2 region. As shown in FIG. 10A, SEAL2 was associated with H3K27ac signals. FIG. 10B shows a genome region zoomed into the COL12A1 transcript, showing that expression of COL12A1 is upregulated in COMB induced CAFs compared to control, as indicated by greater expression signals. COL12A1 also overlapped with the SE region, suggesting that SEAL2 and COL12A1 may be co-regulated through the SE region. Additional in vitro experiments such as H3K27ac Cut&Run analysis will be performed to identify the presence of an active SE region in the in vitro model.

[0236] To test the effect of SEAL2 in COMB induced CAFs, SEAL2 specific primer pairs (PP1-7) were first designed, as shown in FIG. 10C. qPCR amplification was conducted with SEAL2-specific primer pairs and all primer pairs could amplify the SEAL2 transcript, whereof PP3 displayed the best efficiency. Thus, qPCR was performed with PP3 with COMB induced CAFs, which validated SEAL2 expression in COMB induced CAFs compared to control, as shown in FIG. 10D.

[0237] SEAL2 antisense oligonucleotides (ASOs) were also designed as shown in FIG. 10F, to modulate SEAL2 expression in COMB induced CAFs and to investigate the effect of SEAL2 knockdown. Prior to transfecting the cells with the ASOs, read out of myCAF markers and SEAL2 expression were observed in control and COMB induced CAFs via qPCR to establish baseline expression of these markers without ASO treatment, as shown in FIG. 10E. Next, primary HDFs were induced by COMB at the same time as transfection with ASOs. Briefly, 100,000 primary HDFs per well of 6-well plate were plated one day before transfection with SEAL2 ASOs or Scramble control ASO (Scrl). Right before ASO transfection, the cell medium was changed to serum-free medium containing 5 ng/ml TGFβ. ASOs were diluted in TE buffer to a working solution of 20 M and was mixed with OptiMEM medium and X-tremeGENE HP transfection reagent. The mixture was incubated at room temperature for minimum of 15 minutes, and then added dropwise to the cells at 100 l/well, with the total amount of 50 pmol ASO/well. Cells were harvested after 48 hours for RNA extraction and qPCR analysis, as described in Example 2. As shown in FIGS. 11A-11I, qPCR was performed to investigate expression of SEAL2 and myCAF markers (COL12A1, COL5A2, PDPN, CTHRC1, and COL11A1) upon transfection of SEAL2 ASOs versus Scrl. qPCR analysis showed that transfection of most SEAL2 ASOs, resulted in reduced expression of SEAL2 compared to Scrl (FIG. 11A). Transfection of SEAL2_G4, SEAL2_G5, SEAL2_G7, and SEAL2_G8 ASOs lead to decreased expression of several myCAF markers. For example, transfection of SEAL2_G4 ASO resulted in statistically significant reduced expression of COL12A1 (FIG. 11B), COL5A2 (FIG. 11C), and CTHRC1 (FIG. 11E). Transfection of SEAL2_G5 ASO resulted in statistically significant reduced expression of COL12A1 (FIG. 11B), CTHRC1 (FIG. 11E), FAP (FIG. 11G), and LRRC15 (FIG. 11I). Similarly, transfection of SEAL2_G7 or SEAL2_G8 ASO resulted in statistically significant reduced expression of COL12A1 (FIG. 11B), COL5A2 (FIG. 11C), and PDPN (FIG. 11D). Transfection of SEAL2_G7 ASO also resulted in statistically significant reduced expression of FAP (FIG. 11G).

[0238] As transfection of SEAL2_G4, SEAL2_G5, SEAL2_G7, and SEAL2_G8 ASOs resulted in the most decreased expression of SEAL2 and various myCAF markers, whether these ASOs affect cell viability was next investigated. As shown in FIG. 12, microscopic images were taken of HDFs after 48 hours of COMB induction and SEAL2 ASO transfection or Scrl. Transfection of Scrl, SEAL2_G4, SEAL2_G5, or SEAL2_G8 ASOs resulted in high RNA yield and low toxicity, compared to SEAL2_G7 ASO. Collectively, these data suggested that SEAL2_G4, SEAL2_G5, and SEAL2_G8 ASOs have high efficiency. To confirm such results, qPCR analysis of expression of SEAL2 and myCAF markers (COL12A1, COL5A2, PDPN, CTHRC1, COL11A1, FAP, MMP11, and LRRC15) was conducted with COMB induced CAFs transfected with Scrl, SEAL2_G4, SEAL2_G5, or SEAL2_G8 ASOs. Transfection of SEAL2_G4, SEAL2_G5, or SEAL2_G8 ASOs lead to reduced expression of SEAL2 compared to Scrl (FIG. 13A). In addition, transfection of SEAL2_G4, SEAL2_G5, or SEAL2_G8 lead to statistically significant reduced expression of COL12A1 (FIG. 13B). Transfection of SEAL2_G4 further lead to statistically significant reduced expression of COL5A2 (FIG. 13C) and CTHRC1 (FIG. 13E). Transfection of SEAL2_G5 ASO further lead to statistically significant reduced expression of CTHRC1 (FIG. 13E), FAP (FIG. 13G), and LRRC15 (FIG. 13I), while transfection of SEAL2_G8 ASO further lead to statistically significant reduced expression of COL5A2 (FIG. 13C) and PDPN (FIG. 13D). These data showed that knockdown of SEAL2 affects expression of myCAF markers, suggesting the potential involvement of SEAL2 in CAFs and CAF pro-tumorigenic function.

[0239] RNA-seq was performed with COMB induced CAFs transfected with Scrl, SEAL2_G4, or SEAL2_G8. Similar to FIG. 13A, RNA-sequencing showed that transfection of SEAL2_G4, or SEAL2_G8 reduced expression of SEAL2 compared to Scrl. (FIG. 13J). With the RNA-seq data, gene expression patterns of COMB induced CAFs transfected with Scrl, SEAL2_G4, or SEAL2_G8 were analyzed using the signature myCAF gene set with Singscore, wherein a higher score indicates that the pattern of gene expression in a sample is concordant with the pattern in the myCAF signature gene set. As shown in FIG. 13K, COMB induced CAFs transfected with SEAL2_G4, or SEAL2_G8 showed decreased Singscore of the myCAF signature gene set compared to Scrl, indicating that inhibition or downregulation of SEAL2 by ASO treatment reduced gene expression pattern of the myCAF signature gene set. Gene ontology enrichment analysis was also conducted with genes that were downregulated upon SEAL2_G4 ASO and SEAL2_G8 ASO treatment. Downregulated genes were enriched in myCAF-related functions, such as extracellular matrix structure organization, suggesting the potential role of SEAL2 in CAF pro-tumorigenic function.

### Example 5: Characterization of SEAL3 in TGFβ and COMB Induced CAFs

[0240] Using the same procedure as described in Example 3, genomic SEAL3 locus was determined. As shown in FIG. 14A, SEAL3 is located in chr1:66390975-66516344 on the anti-sense strand. Expression of SEAL3 was also upregulated in TGFβ/COMB induced CAFs compared to control. No known CAF-related protein coding gene was near SEAL3; however, a primary CAF super-enhancer (SE) region overlapped with SEAL3, as assessed by the ROSE algorithm and visualized on the genome browser. This may indicate a possible CAF-related regulatory control of SEAL3. In addition, since H3K27ac is associated with gene activation, human colorectal cancer CAF and HDF H3K27ac ChIP-seq data were obtained and aligned to GRCh38 genome using Bowtie2 program to observe H3K27ac marks in the SEAL3 region. As shown in FIG. 14A, SEAL3 was associated with H3K27ac signals.

[0241] To test the effect of SEAL3 in COMB induced CAFs, SEAL3 specific primer pairs (PP1-4) were first designed, as shown in FIG. 14B, top. Using cDNA synthesized using Quantitect reverse transcription kit, qPCR amplification was conducted with the SEAL3 specific primer pairs. All primer pairs could amplify SEAL3, and PP1 and PP2 displayed the best efficiency. Thus, qPCR was performed with PP1 with COMB induced CAFs, which validated SEAL3 expression in COMB induced CAFs compared to control, as shown in FIG. 14C. SEAL3 specific ASOs were also designed as shown in FIG. 14B, bottom, to modulate SEAL3 expression in COMB induced CAFs. As described in Example 3 and Example 4, the effect of SEAL3 knockdown on TGFβ/COMB induced CAFs can be investigated by using SEAL3 ASOs.

[0242] Control HDFs and COMB induced CAFs were transfected with Scrl (control) or SEAL3-targeting ASOs as described in Example 3 and Example 4 and evaluated after 48h for the expression of SEAL3 and myCAF markers (COL5A2, COL11A1, COL12A1, POSTN, FAP, and FN1) by qPCR, as shown in FIGS. 14D-14J. qPCR analysis, performed as described in Example 2, showed that transfection of SEAL3_G1-G8 ASOs led to statistically significant reduced expression of SEAL3 (FIG. 14D) and decreased expression of several myCAF markers compared to Scrl. For example, transfection of SEAL3_G1 resulted in statistically significant reduced expression of COL5A2 (FIG. 14E), COL11A1 (FIG. 14F), POSTN (FIG. 14H), FAP (FIG. 14I) and FN1 (FIG. 14J). Transfection of SEAL3_G2 resulted in statistically significant reduced expression of COL5A2 (FIG. 14E), POSTN (FIG. 14H) and FAP (FIG. 14I), transfection of SEAL3_G3 of COL5A2 (FIG. 14E), COL11A1 (FIG. 14F), FAP (FIG. 14I), and FN1 (FIG. 14J), and transfection of SEAL3_G4 of COL5A2 (FIG. 14E), COL11A1 (FIG. 14F), POSTN (FIG. 14H) and FAP (FIG. 14I). Transfection of SEAL3_G5 and SEAL3_G6 resulted in statistically significant reduced expression of COL5A2 (FIG. 14E), COL11A1 (FIG. 14F), COL12A1 (FIG. 14G), POSTN (FIG. 14H), FAP (FIG. 14I) and FN1 (FIG. 14I). Transfection of SEAL3_G7 and SEAL3_G8 resulted in statistically significant reduced expression of COL5A2 (FIG. 14E), COL11A1 (FIG. 14F), POSTN (FIG. 14H), FAP (FIG. 14I) and FN1 (FIG. 14I). As transfection of SEAL3_G5, SEAL2_G6 and SEAL3_G7 ASOs resulted in the most decreased expression of SEAL3 and various myCAF markers, whether these ASOs affect cell viability was next investigated. As shown in FIG. 14K, microscopic images were taken of HDFs after 48 hours of COMB induction and SEAL3 ASO transfection or Scrl. Transfection of Scrl, SEAL3_G6 or SEAL3_G7 ASOs resulted in high RNA yield and low toxicity, compared to SEAL3_G5 ASO that showed moderate toxicity. Collectively, these data suggested that SEAL3_G6 and SEAL3_G7 ASOs have high efficiency and low toxicity. To confirm such results, qPCR analysis for SEAL3 expression and the expression of myCAF markers (COL5A2, COL11A1, COL12A1, POSTN, FAP and FN1) was conducted with COMB induced CAFs transfected with Scrl, SEAL3_G6 or SEAL3_G7. Transfection of SEAL3_G6 or SEAL3_G7 ASOs lead to reduced expression of SEAL3 compared to Scrl (FIG. 14L). In addition, transfection of SEAL3_G6 or SEAL2_G7 lead to statistically significant reduced expression of COL5A2 (FIG. 14M), COL11A1 (FIG. 14N), COL12A1 (FIG. 14O), POSTN (FIG. 14P), FAP (FIG. 14Q) and FN1 (FIG. 14R). These data showed that knockdown of SEAL3 affects expression of myCAF markers, suggesting the potential involvement of SEAL3 in CAFs and CAF pro-tumorigenic function.

### Example 6: Characterization of SEAL4 in TGFβ and COMB Induced CAFs

[0243] Using the same procedure as described in Example 3, genomic SEAL4 locus was determined. As shown in FIG. 15A, SEAL4 is located in chr12:67394371-67590771 on the sense strand, near the DYRK2 gene. Expression of SEAL4 was also upregulated in TGFβ/COMB induced CAFs compared to control. To be able to test the effect of SEAL4 in COMB induced CAFs, SEAL4 specific primer pairs (PP1-6) were first designed, as shown in FIG. 15B. Using cDNA synthesized using Quantitect reverse transcription kit, qPCR amplification was conducted with the SEAL4 specific primer pairs. All primer pairs could amplify SEAL4, and PP5 and PP6 displayed the best efficiency as shown in FIG. 15C. SEAL4 ASOs were also designed as shown in FIG. 15D, to modulate SEAL4 expression in COMB induced CAFs. As described in Example 3 and Example 4, the effect of SEAL3 knockdown on TGFβ/COMB induced CAFs can be investigated by using SEAL4 ASOs.

[0244] Control HDFs and COMB induced CAFs were transfected with Scrl (control) or SEAL4-targeting ASOs as described in Examples 3, 4 and 5 and evaluated after 48h for the expression of SEAL4 and myCAF markers (COL5A2, COL11A1, COL12A1, FAP, and FN1) by qPCR, as shown in FIGS. 15E-15J. qPCR analysis, performed as described in Example 2, showed that transfection of SEAL4 G1, SEAL4 G3, SEAL4_753 G1, SEAL4_753_G4, SEAL4_753_G5, SEAL4_753_G6 and SEAL4_753_G7 ASOs led to reduced expression of SEAL4 (FIG. 15E). SEAL4 ASOs also led to decreased expression of several myCAF markers compared to Scrl. For example, transfection of SEAL4_753_G4 SEAL4_753_G7 resulted in statistically significant reduced expression of COL5A2 (FIG. 15F). Transfection of SEAL4_G1, SEAL4_753_G1, SEAL4_753_G4, SEAL4_753_G5, SEAL4_753_G6 or SEAL4_753_G7 led to decreased expression of COL5A2 (FIG. 15F) and COL11A1 (FIG. 15G). Transfection of SEAL4_G1, SEAL4_753_G1, SEAL4_753_G5, SEAL4_753_G6 or SEAL4_753_G7 led to decreased expression of COL5A2 (FIG. 15F), COL11A1 (FIG. 15G), COL12A1 (FIG. 15H), FAP (FIG. 15I) and FN1 (FIG. 15J). As transfection of SEAL4_753_G1, SEAL4_753_G5, SEAL4_753_G6 and SEAL4_753_G7 ASOs resulted in the most decreased expression of SEAL4 and various myCAF markers, whether these ASOs affect cell viability was next investigated. As shown in FIG. 15K, microscopic images were taken of HDFs after 48 hours of COMB induction and SEAL4 ASO transfection or Scrl. Transfection of Scrl, SEAL4_753_G5, SEAL4_753_G6 and SEAL4_753_G7 ASOs resulted in high RNA yield and low toxicity, compared to SEAL4_753_G1 ASO that showed moderate toxicity. Collectively, these data suggested that SEAL4_753_G5, SEAL4_753_G6 and SEAL4_753_G7 ASOs have high efficiency and low toxicity. To confirm such results, qPCR analysis of SEAL4 expression and myCAF markers (COL5A2, COL11A1, COL12A1, FAP and FN1) was conducted with COMB induced CAFs transfected with Scrl, SEAL4_753_G6 or SEAL4_753_G7 ASOs. Transfection of SEAL4_753_G6 or SEAL4_753_G7 ASOs lead to statistically significant reduced expression of SEAL4 compared to Scrl (FIG. 15L). In addition, transfection SEAL4_753_G6 or SEAL4_753_G7 ASOs lead to statistically significant reduced expression of COL5A2 (FIG. 15M) and COL11A1 (FIG. 15N). Transfection of SEAL4_753_G6 or SEAL4_753_G7 also resulted in decreased expression of COL12A1 (FIG. 15O), FAP (FIG. 15P) and FN1 (FIG. 15Q).

### Example 7: Characterization of SEAL9 in TGFβ Induced CAFs

[0245] Using the same procedure as described in Example 3, the genomic locus of SEAL9 was determined. As shown in FIG. 16A, besides SEAL1 which maps to hg38 genomic coordinates chr3:194355288-194358966, the genomic locus is shared with another of the novel lncRNAs SEAL9, as well as with the protein-coding gene LRRC15, recognized as a CAF-specific marker proposed to be important for CAF-mediated pro-tumorigenic functions, immunotherapy response and patient prognosis. The LRRC15 mRNA is transcribed from the negative (−) strand and the lncRNAs SEAL1 and SEAL9 from the positive (+) strand. SEAL1 overlaps a region at the 3′ end of LRRC15, including a part of LRRC15 exon 2. SEAL9 overlaps a region at the 5′ start of LRRC15, including LRRC15 exon 1 and the annotated transcription start site (TSS), and further extends upstream of LRRC15. Both SEAL1 and SEAL9 lncRNAs were predicted to contain two exons and of non-coding potential.

[0246] SEAL9 was upregulated in TGFβ induced CAFs compared to control. To validate the expression SEAL9 in TGFβ induced CAFs, SEAL9-specific primers were designed and qPCR performed, detecting the SEAL9 transcript in experimental replicates, as shown in FIG. 16B. SEAL9 ASOs were also designed (Table 2), as shown in FIG. 16C, to modulate SEAL9 expression in TGFβ induced CAFs. Control HDFs and TGFβ induced CAFs were transfected with Scrl (control) or SEAL9-targeting ASOs as described in Example 3, 4, 5 and 6 and evaluated after 48h for the expression of SEAL9, SEAL1, and myCAF markers (LRRC15, COL12A1, FAP, COL5A2, FOL11A1, and CTHRC1) by qPCR, as shown in FIG. 17A-17H. qPCR analysis, performed as described in Example 2, showed that transfection of SEAL9_G1, SEAL9_G2 and SEAL9_G3 ASOs clearly reduced expression of SEAL9 compared to Scrl (FIG. 17A).Transfection of SEAL9_G2 ASO resulted in statistically significant reduced expression of LRRC15 (FIG. 17B), COL12A1 (FIG. 17D), FAP (FIG. 17E), COL5A2 (FIG. 17F) and CTHRC1 (FIG. 17H). Similarly, transfection of SEAL9_G3 ASO resulted in statistically significant reduced expression of LRRC15 (FIG. 17B), COL12A1 (FIG. 17D), FAP (FIG. 17E) and COL5A2 (FIG. 17F). Moreover, COL11A1 was also reduced upon transfection with SEAL9_G2 and SEAL9_G3 ASOs (FIG. 17G). These data showed that downregulation of SEAL9 expression by ASOs reduces the expression of myCAF markers, suggesting the potential involvement of SEAL9 in CAF pro-tumorigenic function. Transfection of SEAL9_G2 or SEAL9_G3 ASOs also resulted in reduced expression of SEAL1 (FIG. 17C), implying a co-regulatory mechanism. As transfection of SEAL9_G2 and SEAL9_G3 ASOs resulted in the most decreased expression of various myCAF markers, whether these ASOs affect cell viability was next investigated. As shown in FIG. 18, microscopic images were taken of HDFs after 48 hours of TGFβ induction and SEAL9 ASO transfection or Scrl. Transfection of Scrl, SEAL9_G1, SEAL9_G2 or SEAL9_G3 ASOs resulted in high RNA yield and low toxicity. Taken together, these data suggested that SEAL9_G2 and SEAL9_G3 ASOs have high efficiency and relatively low toxicity.

### Example 8: Characterization of the Mouse Seal1 Functional Equivalent (mSeal1) in TGF-Induced Mouse Dermal Fibroblasts (MDFs)

[0247] To characterize the function of the mouse mSeal1 functional equivalent, an in vitro model analogous to the HDF model described in Example 2, was established. Immortalized MDFs (iMDFs) were cultured at 70-90% in FGM-3 Fibroblast Growth Medium-3 BulletKit (Lonza) and passaged 1-2 times/week using TrypLE Express (Gibco). For TGFβ and TGFβ+ starvation (COMB) induction, 100,000 MDFs were seeded in 6-well plates and were left to acclimate for 48 hours before induction. For TGFβ induction, cells were treated with 5 ng/ml TGFβ for 48 hours and then harvested for downstream analyses. For COMB induction, cells were treated with 5 ng/ml TGFβ in cell medium without fetal bovine serum (FBS) (starvation) for 48 hours before harvest. RNA extraction, sequencing and differential gene expression analysis was performed as described in Example 2. RNA-seq data processing was performed as described in Example 3 and visualized in the UCSC Genome Browser on GRCm39/mm39. As shown in FIG. 20A-20B, gene expression of control and TGFβ-induced iMDFs was investigated by RNA-seq. As shown in FIG. 20A, mSeal1 is located on Chr16:30088120-30093787 on the sense strand, overlapping with some region of mLrrc15 mRNA, transcribed in the opposite (anti-sense) orientation. Sequence alignment analysis, removing smaller matches of <10 nucleotides, identified 16 conserved regions between human and mouse at varying level of similarity, >90%, >75% or >50% (FIG. 20A). Expression of mSeal1 and mLrrc15 was upregulated in TGFβ induced CAF-like iMDFs compared to control (FIG. 20B). To modulate mSeal1 expression in TGFβ induced CAF-like iMDFs and investigate the effect of mSeal1 knockdown, various ASOs were designed (Table 15) to target different regions of the mSeal1 transcript as shown in FIG. 20C. The effect of targeting different regions of mSeal1 (ASOs mSeal1-6) was compared to that of targeting mLrrc15, achieved by designing ASOs targeting different regions of mLrrc15: ASOs mLrrc15_G1 (sequence 5′ TCCTATCGTCAACCGG), mLrrc15_G2 (sequence 5′-GGTGTATTAGTCGTCC-3′) and mLrrc15_G3 (sequence 5′-GTAAACGCTTCCGATG-3′) (FIG. 20C). Next, iMDFs were induced by TGFβ at the same time as transfection with ASOs. Briefly, 100,000 iMDFs per well of 6-well plate were plated one day before transfection with mSeal1, mLrrc15 or Scrl control ASOs. Right before ASO transfection, the cell medium was changed to medium containing 5 ng/ml TGFβ. ASOs were diluted in TE buffer to a working solution of 20 M and was mixed with OptiMEM medium and X-tremeGENE HP transfection reagent. The mixture was incubated at room temperature for minimum of 15 minutes, and then added dropwise to the cells at 100 l/well, with the total amount of 100 pmol ASO/well. Cells were harvested after 48 hours for RNA extraction and RNA-seq analysis. As shown in FIG. 20D, iMDFs with TGFβ induction and ASO (Scrl, mSeal1_G5, mSeal1_G6 or mLrrc15_G3 ASOs) transfection were still viable and healthy, as compared to control iMDFs. An acceptable toxic effect was observed with the mSeal1_G6 ASO (FIG. 20D, bottom). As shown in FIG. 20E-20F, bulk RNA-seq analysis was performed to investigate the expression of mSeal1, mLrrc15, and myCAF signature genes upon transfection with mSeal1_G6 (mSeal1_6) or mLrrc15_G3 (mLrrc15_3) ASOs versus Scrl. RNA-seq analysis showed that the mSeal1_G6 (mSeal1_6) ASO reduced the mSeal1 expression in one of the two experimental replicates (FIG. 20E, left), and that the mLrrc15_G3 (mLrrc15_3) ASO reduced the mLrrc15 expression (FIG. 20E, right). Singscore calculation was performed of the mouse orthologous myCAF signature (Table 13) (FIG. 20F, left) and the mouse orthologous SEAL1 TEP signature (Table 14) (FIG. 20F, right). This analysis showed that Singscores of both signatures were reduced, with the orthologous SEAL1 TEP signature significantly reduced, upon transfection with the mSeal1_G6 (mSeal1_6) ASO, while transfection with the mLrrc15_G3 (mLrrc15_3) ASO only caused a minor reduction in the signature scores (FIG. 20F). These results suggest that the mouse mSeal1 exhibits a function in MDFs as observed in human HDFs, with mSeal1 contributing more to the myCAF identity than mLrrc15. To investigate mSeal1 expression in a mouse model of tumor development, a scRNA-seq dataset of a pancreatic ductal adenocarcinoma (PDAC) mouse model was used (Krishnamurty et al, LRRC15+ myofibroblasts dictate the stromal setpoint to suppress tumour immunity, Nature 611(7934), 2022). Raw data was obtained and analyzed as in Example 1 to annotate cell types, identify FBs, sub-cluster FBs and quantify mSeal1 and mLrrc15. FIG. 20G shows a description of the PDAC mouse model. Mouse PDAC tumor cells were implanted into DTR− or DTR+ genotype mice, and initiated PDAC tumor development. DTR− genotype mice had a wild-type (wt) mSeal1/mLrrc15 genomic locus while DTR+ genotype mice had a heterogeneously modified (DTR-GFP cassette knock-in) mSeal1/mLrrc15 genomic locus, whereby both mSeal1 and mLrrc15 coding sequences were disrupted (figure modified from Krishnamurty et al, Nature 2022). In DTR+ genotype mice, diphtheria toxin (DT) is produced from the modified mSeal1/mLrrc15 genomic locus in cells where the mLrrc15 promoter is active, leading to depletion of these cells upon treating the DTR+ mice with DT. Thus, this model captures a mSeal1/mLrrc15 locus depletion phenotype. FIG. 20H-20I shows the scRNA-seq analysis of the mSeal1/mLrrc15 locus depletion phenotype. Seven fibroblasts sub-clusters were identified, with fibroblast sub-clusters 2 and 4 present in pre-implant (naïve) skin (FIG. 20H, top left and middle). 10 days after tumor implant (Day 0 sample), the fibroblast sub-clusters 0, 1, 3, 5, and 6 appeared with sub-clusters 0, 1, and 3 having the most fibroblasts and representing CAF activation (FIG. 20H, top right). During tumor development (Day 14 DTR− sample), the sub-clusters 0, 1, and 3 became more dominant in DTR− mice, the myCAFs with an active Lrrc15 promoter present (FIG. 20H, bottom left.) In DTR+ mice with DT administration (Day 14 DTR+ sample), the sub-cluster 0 was clearly depleted confirming its identity as mLrrc15/mSeal1-expressing myCAFs (FIG. 20H, bottom middle). The depletion of sub-cluster 0 was accompanied with an increase in sub-cluster 1 and 3 fibroblasts (FIG. 20H, bottom middle). Upon removal of DT, the sub-cluster 0 re-emerged in DTR+ mice (Day 21 sample), further confirming the identity (FIG. 20H, bottom right). FIG. 20I (top panel) showed that mSeal1 was absent in pre-implant fibroblasts, while specifically induced in Day 14 DTR− sample sub-cluster 0 fibroblasts and completely depleted in Day 14 DTR+ sample sub-cluster 0 fibroblasts. Sub-clusters 1 and 3 that were increased in Day 14 DTR+ samples did not display mSeal1 expression (FIG. 20I, top middle). mSeal1 also re-emerged in Day 21 DTR+ sample sub-cluster 0 fibroblasts upon removal of DT (FIG. 20I, top right). mLrrc15 also showed the strongest expression in Day 14 DTR− sample sub-cluster 0 fibroblasts (FIG. 20I, bottom middle) while being mostly absent in pre-implant fibroblasts (FIG. 20I, bottom left), and completely depleted in Day 14 DTR+ sample sub-cluster 0 fibroblasts (FIG. 20I, bottom middle). While sub-clusters 1 and 3 fibroblasts that were increased in Day 14 DTR+ samples did not display mSeal1 expression, some mLrrc15 expression was detected in those cells (FIG. 20I, bottom middle), suggesting a slightly different expression pattern than mSeal1. Upon DT removal, mLrrc15 expression re-emerged in Day 21 DTR+ sample sub-cluster 0 fibroblasts, as well as retained in sub-cluster 1 and 3 fibroblasts. These data suggest that mSeal1 may be induced during PDAC CAF activation and tumor progression. Consistently, as shown in FIGS. 4l and 4m from Krishnamurty et al, both tumor weights and volumes in DTR+ mice were reduced compared to DTR− mice with or without immunotherapy (anti-PDL1) treatment, and the reduction was further potentiated by anti-PDL1 treatment in DTR+ mice. These data independently prove that DTR+ mice were more susceptible to immunotherapy treatment (anti-PDL1), than DTR− mice. These results also suggested that an intact mSeal1/mLrrc15 locus, and expression of mSeal1 and mLrrc15, confers resistance to immunotherapy, strengthening the idea that therapeutic targeting of mSeal1 may be of clinical benefit. The expression of the murine mSeal1 was further confirmed in a scRNA-seq dataset (Samstein et al, Mutations in BRCA1 and BRCA2 differentially affect the tumor microenvironment and response to checkpoint blockade immunotherapy. Nature Cancer 1(12), 2021) from 8 tumor samples of a mouse model of TNBC, the 4T1 syngeneic mouse model. mSeal1 was expressed in the same sub-population of fibroblasts as mLrrc15, and that displayed expression of mouse disease-state fibroblast gene expression (signature defined by Buechler et al, Cross-tissue organization of the fibroblast lineage. Nature 593(7860), 2021).

TABLE 15
Sequences of exemplary ASO candidates
targeting murine Seal1 (mSeal1)
IncRNA (chr16:30088120-30093787)

| SEQ | | | |
|---|---|---|---|
| ID | | | |
| NO. | ASO name | Sequence | Target |
| 2065 | mSeal1_G1/ | GGACGACTAATACACC | mSeal1 |
| | mSeal_1 | | |
| 2066 | mSeal1_G2/ | AGTCTCCGCAAGTAGT | mSeal1 |
| | mSeal_2 | | |
| 2067 | mSeal1_G3/ | TAGATGCGGCTTGTAA | mSeal1 |
| | mSeal_3 | | |
| 2068 | mSeal1_G4/ | GCTTGACACAGTACCG | mSeal1 |
| | mSeal_4 | | |
| 2069 | mSeal1_G5/ | CTCGCAGTACAGTTAC | mSeal1 |
| | mSeal_5 | | |
| 2070 | mSeal1_G6/ | TGTGCCACGGCTTGAC | mSeal1 |
| | mSeal_6 | | |

[0248] While preferred instances of the present disclosure have been shown and described herein, it will be obvious to those skilled in the art that such instances are provided by way of example only. It is not intended that the disclosure be limited by the specific examples provided within the specification. While the disclosure has been described with reference to the aforementioned specification, the descriptions and illustrations of the instances herein are not meant to be construed in a limiting sense. Numerous variations, changes, and substitutions will now occur to those skilled in the art without departing from the disclosure. Furthermore, it shall be understood that all aspects of the disclosure are not limited to the specific depictions, configurations or relative proportions set forth herein which depend upon a variety of conditions and variables. It should be understood that various alternatives to the instances of the disclosure described herein may be employed in practicing the disclosure. It is therefore contemplated that the disclosure shall also cover any such alternatives, modifications, variations or equivalents. It is intended that the following claims define the scope of the disclosure and that methods and structures within the scope of these claims and their equivalents be covered thereby.

What is claimed is:

1. A modulator of a long non-coding RNA (lncRNA), wherein an expression or activity of the lncRNA is associated with an activation of a cancer-associated fibroblast (CAF).

2. The modulator of claim 1, wherein the expression or activity of the lncRNA is upregulated in the CAF compared to a fibroblast not associated with cancer.

3. The modulator of claim 1 or 2, wherein the CAF exhibits a higher expression of an ECM-modulatory gene when compared to a fibroblast that is not associated with cancer.

4. The modulator of claim 3, wherein the ECM-modulatory gene is selected from the group consisting of C1QTNF3, COL5A2, ITGA11, PDPN, POSTN, ACTA2, ACTN1, ADAM12, ADAMTS12, AEBP1, ALDH18A1, ANTXR1, ARF4, ARL4C, BACE2, BASP1, BGN, BHLHE40, BMP1, BST2, C11orf24, C1orf198, C1QTNF6, CADM1, CALD1, CALU, CCND1, CD276, CDC42EP3, CERCAM, CHN1, CHPF, CKAP4, CLEC11A, CLIC4, CNN2, COL10A1, COL11A1, COL12A1, COL1A1, COL1A2, COL5A1, COL8A1, COLGALT1, CREB3L1, CSRP2, CTHRC1, CTSB, CTSK, CTSZ, CXCL2, CXCL3, DAP, DIO2, DPYSL3, DUSP10, EDIL3, EDNRA, EFEMP2, EGFL6, ERN1, FAP, FBXO32, FKBP10, FN1, FSCN1, FZD1, GAPDH, GEM, GGT5, GJA1, GLT8D2, GOLM1, GPX7, GPX8, GREM1, HAPLN3, HCFC1R1, HES4, HLA-B, HLA-C, HS3ST3A1, ID1, ID4, IER3, IFI27, IFI6, IL32, INHBA, ITGB5, ITPRIP, KDELR2, KDELR3, KIAA1217, KIF26B, KLF6, LAMP5, LEF1, LMCD1, LMO7, LOXL2, LRRC15, LUM, MAGED1, MARCKSL1, MARVELD1, MDK, MICAL2, MIF, MMP11, MMP14, MMP19, MMP2, MSRB3, MXRA5, MYH9, MYL9, NEK6, NR4A2, NREP, NRP2, NTM, NXN, OLFML2B, P3H1, P3H4, P4HA3, P4HB, PALLD, PARVA, PDGFC, PDLIM7, PEA15, PERP, PKM, PLOD1, PLOD2, PMAIP1, PMEPA1, PODNL1, POSTN, PRDX4, PRSS23, PTGER3, PTK7, PYCR1, RAB31, RAI14, RBM3, RCAN2, RCN1, RCN3, RGCC, RGS3, RIN2, RNF144A, ROR2, RUNX2, SCARF2, SDC1, SEC13, SERPINHI, SFRP2, SHISA5, SLC16A3, SLC38A5, SLC39A14, SMCO4, SMIM3, SMYD3, SNAI2, SPARC, SPATS2L, SPHK1, SPON1, SSR3, STK17B, SUGCT, SULF1, SULF2, SYTL2, TAGLN, TENM3, TGFB1I1, TGFBI, THBS2, THY1, TMEM119, TMEM263, TMEM45A, TNFAIP3, TOM1, TPM1, TPM4, TPST2, TSPO, TUBA1C, TUSC3, UBTD1, UNC5B, VCAN, VGLL4, and VOPPl.

5. The modulator of any one of the preceding claims, wherein one or more enhancers are within a genomic locus encoding the lncRNA, wherein the one or more enhancers are associated with the CAF.

6. The modulator of any one of the preceding claims, wherein the expression or activity of the lncRNA is not upregulated in a cell that is not associated with cancer.

7. The modulator of any one of the preceding claims, wherein one or more protein-coding genes are at most 100, 200, 300, 400, or 500 nucleotides upstream or downstream of or within the genomic locus encoding the lncRNA, wherein the one or more protein-coding genes are associated with the CAF.

8. The modulator of claim 7, the one or more protein-coding genes are associated with a pro-tumorigenic or fibrosis development function of the CAF.

9. The modulator of claim 7 or 8, the one or more protein-coding genes are selected from the group consisting of LRRC15, COL12A1, DYRK2, FN1, and CAPN9.

10. The modulator of any one of the preceding claims, wherein the lncRNA comprises any one of lncRNAs listed in Table 10 or Table 12, or a fragment thereof.

11. The modulator of any one of the preceding claims, wherein the lncRNA comprises XLOC 055514, XLOC_055515, XLOC_069921, XLOC 005184, ENSG00000203585, SHARED_00113753, ENSG00000288903, ENSG00000230838 (LINC01614), ENSG00000244137, or a fragment thereof, as listed in Table 10.

12. The modulator of any one of the preceding claims, wherein the modulator comprises an endonuclease complex guided by a nucleic acid, wherein the nucleic acid targets the lncRNA or a genomic locus thereof.

13. The modulator of claim 12, wherein the modulator is an ASO-directed RNA editing complex, a CRISPR-directed DNA editing complex, or a CRISPR-directed RNA editing complex.

14. The modulator of any one of claims 1 to 13, wherein the modulator comprises a nucleic acid molecule that hybridizes to the lncRNA.

15. The modulator of claim 14, wherein the nucleic acid molecule is a small interfering RNA (siRNA), a microRNA (miRNA), an inhibitory double stranded RNA (dsRNA), a small or short hairpin RNA (shRNA), an antisense oligonucleotide (ASO), a piwi-interacting RNA (piRNA), a heterogeneous nuclear RNA (hnRNA), a small nuclear RNA (snRNA), or an enzymatically-prepared siRNA (esiRNA) or the precursors thereof.

16. The modulator of claim 15, wherein the ASO is a gapmer or a mixmer.

17. The modulator of claim 16, wherein the ASO is about 13-30, or about 14-18 nucleotides long.

18. The modulator of any one of claims 15-17, wherein the nucleic acid molecule comprises at least 10, 11, 12, or 13 consecutive nucleotides with no more than 1, 2, or 3 mismatches from one of SEQ ID NOs: 1-40.

19. The modulator of any one of claims 15-18, wherein the nucleic acid molecule comprises a nucleic acid sequence that is at least 80%, at least 85%, at least 90%, at least 95% identical to a sequence selected from one of SEQ ID NOs: 1-40.

20. The modulator of any one of claims 15-19, wherein the ASO comprises 5′-wing region and 3′-wing region, and at least 5′-wing region and 3′-wing region comprises a nucleic acid analogue selected from a 2′-methoxyethyl (2′-MOE) RNA and a locked nucleic acid (LNA).

21. The modulator of claim 20, wherein the LNA comprises a beta-D-oxy LNA, an alpha-L-oxy-LNA, a beta-D-amino-LNA, an alpha-L-amino-LNA, a beta-D-thio-LNA, an alpha-L-thio-LNA, a 5′-methyl-LNA, a beta-D-ENA, or an alpha-L-ENA.

22. The modulator of any one of claims 20 and 21, wherein the 5′-wing region comprises at least two LNAs.

23. The modulator of any one of claims 20-22, wherein the 5′-wing region comprises three consecutive LNAs.

24. The modulator of any one of claims 20-23, wherein the 3′-wing region comprises at least one LNA.

25. The modulator of any one of claims 20-24, wherein the 3′-wing region comprises two consecutive LNAs.

26. The modulator of any one of claims 15-25, wherein the ASO comprises one or more phosphorothioate internucleotide linkages.

27. The modulator of any one of claims 15-26, wherein each internucleotide linkage is a phosphorothioate backbone.

28. A modulator comprising an antisense oligonucleotide (ASO), wherein the ASO comprises at least 10, 11, 12, or 13 consecutive nucleotides with no more than 1, 2, or 3 mismatches from SEQ ID NO: 2, 4, 5, 9-11, 15, 16, 18, 19, 24-26, 34 or 38-40.

29. The modulator of claim 28, wherein the ASO comprises a nucleic acid sequence of 80%, at least 85%, at least 90%, at least 95% identical to SEQ ID NO: 2, 4, 5, 9-11, 15, 16, 18, 19, 24-26, 34 or 38-40.

30. A pharmaceutical composition comprising the modulator of any one of claims 1-29 and a pharmaceutically acceptable salt or derivative thereof.

31. A kit comprising the modulator of any one of claims 1 to 29 or the pharmaceutical composition of claim 30.

32. A method of inhibiting a growth of a solid tumor or facilitating access to a solid tumor in a subject in need thereof, the method comprising administering to the subject an effective amount of the modulator of any one of claims 1 to 29 or the pharmaceutical composition of claim 30.

33. The method of claim 32, wherein the modulator of any one of claims 1 to 29 or the pharmaceutical composition of claim 30 reduces expression or activity of genes involved in ECM structure organization, and/or regulation of GTPase activity, and/or regulation of tumor innervation in a tumor microenvironment.

34. The method of claim 33, wherein the genes involved in ECM structure organization and/or regulation of GTPase activity and/or regulation of tumor innervation in a tumor microenvironment is selected from the group consisting of LRRC15, MMP11, COL11A1, C1QTNF3, CTHRCT, COLT2AT, COL10A1, COL5A2, THBS2, AEBPT, ITGATT, PDPN, and FAP.

35. The method of claim 32, wherein the modulator of any one of claims 1 to 29 or the pharmaceutical composition of claim 30 reduces an expression or activity of one or more genes shown in Table 1, Table 13, or Table 14.

36. The method of any one of claims 32 to 35, wherein the modulator of any one of claims 1-29 is encapsulated in a liposome or coupled with a nanoparticle.

37. The method of any one of claims 32 to 36, wherein the modulator of any one of claims 1-29 is administered in combination with an anti-tumor drug.

38. A method of diagnosing or monitoring a cancer in a subject, the method comprising: (a) obtaining a sample from the subject; (b) detecting an expression and/or an activity of a biomarker from the sample, wherein the biomarker comprises an lncRNA comprising a nucleic acid sequence listed in Table 11 or a fragment thereof, or transcribed from a genomic region or a subset thereof listed in Table 10 or Table 12; and (c) diagnosing or monitoring the cancer prognosis based on the expression and/or the activity of the biomarker.

39. A method of predicting severity and progression of a cancer in a subject, the method comprising: (a) obtaining a sample from the subject; (b) detecting an expression and/or an activity of a biomarker from the sample, wherein the biomarker comprises an lncRNA comprising a nucleic acid sequence listed in Table 11 or a fragment thereof, or transcribed from a genomic region or a subset thereof listed in Table 10 or Table 12; and (c) diagnosing the subject to have a more severe or a progression of the cancer if the expression and/or the activity of the biomarker is at least 50%, at least 60%, at least 70%, at least 80%, or at least 90% higher when compared to a control.

40. A method of monitoring an efficacy or therapeutic resistance of a therapy treating a cancer in a subject, the method comprising: (a) obtaining a sample from the subject; (b) detecting an expression and/or an activity of a biomarker from the sample, wherein the biomarker comprises an lncRNA comprising a nucleic acid sequence listed in Table 11 or a fragment thereof, or transcribed from a genomic region or a subset thereof listed in Table 10 or Table 12; and (c) concluding the therapy treating the cancer is effective or is less likely to develop therapeutic resistance if the expression and/or the activity of the biomarker is at least 50%, at least 60%, at least 70%, at least 80%, at least 90% reduced by the therapy.

41. The method of any one of claims 38-40, wherein the biomarker further comprises INHBA, COL11A1, MMP13, NNMT, LOXL3, PLOD2, TNC, ITGA11, COL5A1, COMP, COL1A1, FN1, LTBP2, COL10A1, NOX4, POSTN, CCN2, LRRC15, DCN, LUM, COL1A2, COL3A1, COL6A2, MMP11, COL11A1, C1QTNF3, CTHRC1, COL12A1, COL10A1, COL5A2, THBS2, AEBP1, ITGA11, PDPN, FAP, COL8A1, or a gene from Table 1, Table 13, or Table 14.

42. The method of any one of claims 38-41, wherein the method further comprises (d) administering the subject the modulator of any one of claims 1-29, or the pharmaceutical composition of claim 30.

43. The method of any one of claims 38-42, wherein the cancer is a solid tumor.

44. The method of claim 43, wherein the solid tumor is breast cancer, colorectum cancer, lung cancer, prostate cancer, bladder cancer, head and neck cancer (e.g., head and neck squamous cell carcinoma), skin cancer (e.g., skin melanoma), pancreatic cancer (e.g., pancreatic ductal adenocarcinoma), liver cancer, esophageal cancer, brain cancer, stomach cancer (e.g., stomach adenocarcinoma), gallbladder cancer, ovarian cancer, colon adenocarcinoma, or sarcoma.

The application's sequence listing, which the Patent Office published only in electronic form, follows.

SEQUENCE LISTING (2083 sequences)

SEQ ID NO: 1 - DNA, 16 bp, synthetic construct
  source 1..16: mol_type = other DNA
gggaattgggctgtat

SEQ ID NO: 2 - DNA, 16 bp, synthetic construct
  source 1..16: mol_type = other DNA
tggtgttcaataggct

SEQ ID NO: 3 - DNA, 16 bp, synthetic construct
  source 1..16: mol_type = other DNA
gaaacctcatcatccg

SEQ ID NO: 4 - DNA, 16 bp, synthetic construct
  source 1..16: mol_type = other DNA
gaagttaggctcatgg

SEQ ID NO: 5 - DNA, 16 bp, synthetic construct
  source 1..16: mol_type = other DNA
ggtctggttaggagtt

SEQ ID NO: 6 - DNA, 16 bp, synthetic construct
  source 1..16: mol_type = other DNA
ttatatctggagaccc

SEQ ID NO: 7 - DNA, 16 bp, synthetic construct
  source 1..16: mol_type = other DNA
gatagtgtatggcttg

SEQ ID NO: 8 - DNA, 16 bp, synthetic construct
  source 1..16: mol_type = other DNA
cagtcacacgaatacc

SEQ ID NO: 9 - DNA, 16 bp, synthetic construct
  source 1..16: mol_type = other DNA
gataactcctgcaagt

SEQ ID NO: 10 - DNA, 16 bp, synthetic construct
  source 1..16: mol_type = other DNA
gattgaccgttctgga

SEQ ID NO: 11 - DNA, 16 bp, synthetic construct
  source 1..16: mol_type = other DNA
ctatgtgtaccctgta

SEQ ID NO: 12 - DNA, 16 bp, synthetic construct
  source 1..16: mol_type = other DNA
gtgccttgtgactagt

SEQ ID NO: 13 - DNA, 16 bp, synthetic construct
  source 1..16: mol_type = other DNA
cccattagcctatatg

SEQ ID NO: 14 - DNA, 16 bp, synthetic construct
  source 1..16: mol_type = other DNA
atgttagtcctcctag

SEQ ID NO: 15 - DNA, 16 bp, synthetic construct
  source 1..16: mol_type = other DNA
atgtccaatcctacac

SEQ ID NO: 16 - DNA, 16 bp, synthetic construct
  source 1..16: mol_type = other DNA
gtctttgaccagtgta

SEQ ID NO: 17 - DNA, 16 bp, synthetic construct
  source 1..16: mol_type = other DNA
gatctaactatccacc

SEQ ID NO: 18 - DNA, 16 bp, synthetic construct
  source 1..16: mol_type = other DNA
ctgtgtggaacttatc

SEQ ID NO: 19 - DNA, 16 bp, synthetic construct
  source 1..16: mol_type = other DNA
atgatatgcaccatcc

SEQ ID NO: 20 - DNA, 16 bp, synthetic construct
  source 1..16: mol_type = other DNA
ggtctcactaaagggt

SEQ ID NO: 21 - DNA, 16 bp, synthetic construct
  source 1..16: mol_type = other DNA
gccctatgttagtatc

SEQ ID NO: 22 - DNA, 16 bp, synthetic construct
  source 1..16: mol_type = other DNA
gtcaaccatttgtagg

SEQ ID NO: 23 - DNA, 16 bp, synthetic construct
  source 1..16: mol_type = other DNA
tatgtggtaacaatcc

SEQ ID NO: 24 - DNA, 16 bp, synthetic construct
  source 1..16: mol_type = other DNA
gtgtcccacctattag

SEQ ID NO: 25 - DNA, 16 bp, synthetic construct
  source 1..16: mol_type = other DNA
cttgctctagtatgac

SEQ ID NO: 26 - DNA, 16 bp, synthetic construct
  source 1..16: mol_type = other DNA
ccatgataagagggtc

SEQ ID NO: 27 - DNA, 16 bp, synthetic construct
  source 1..16: mol_type = other DNA
accttatagcacatgc

SEQ ID NO: 28 - DNA, 16 bp, synthetic construct
  source 1..16: mol_type = other DNA
gattacccacttcaag

SEQ ID NO: 29 - DNA, 16 bp, synthetic construct
  source 1..16: mol_type = other DNA
gacacctcaagttaga

SEQ ID NO: 30 - DNA, 16 bp, synthetic construct
  source 1..16: mol_type = other DNA
caagggatgatagctc

SEQ ID NO: 31 - DNA, 16 bp, synthetic construct
  source 1..16: mol_type = other DNA
aggcatggattatacc

SEQ ID NO: 32 - DNA, 16 bp, synthetic construct
  source 1..16: mol_type = other DNA
actaggctacattacc

SEQ ID NO: 33 - DNA, 16 bp, synthetic construct
  source 1..16: mol_type = other DNA
ccctagaataagtacc

SEQ ID NO: 34 - DNA, 16 bp, synthetic construct
  source 1..16: mol_type = other DNA
gtcccaatttgaagcc

SEQ ID NO: 35 - DNA, 16 bp, synthetic construct
  source 1..16: mol_type = other DNA
ggtaaggaatacactc

SEQ ID NO: 36 - DNA, 16 bp, synthetic construct
  source 1..16: mol_type = other DNA
tccaaacttagtcagc

SEQ ID NO: 37 - DNA, 16 bp, synthetic construct
  source 1..16: mol_type = other DNA
aaccattagagtcctc

SEQ ID NO: 38 - DNA, 16 bp, synthetic construct
  source 1..16: mol_type = other DNA
gctgacccataatagg

SEQ ID NO: 39 - DNA, 16 bp, synthetic construct
  source 1..16: mol_type = other DNA
gtaacccatatctgtg

SEQ ID NO: 40 - DNA, 16 bp, synthetic construct
  source 1..16: mol_type = other DNA
gtatcattgttcagcc

SEQ ID NO: 41 - DNA, 16 bp, synthetic construct
  source 1..16: mol_type = other DNA
tgtagagtgtgagccc

SEQ ID NO: 42 - DNA, 16 bp, synthetic construct
  source 1..16: mol_type = other DNA
ttgtagagtgtgagcc

SEQ ID NO: 43 - DNA, 16 bp, synthetic construct
  source 1..16: mol_type = other DNA
gctagatcatgtttgc

SEQ ID NO: 44 - DNA, 16 bp, synthetic construct
  source 1..16: mol_type = other DNA
tagatgtatcctagct

SEQ ID NO: 45 - DNA, 16 bp, synthetic construct
  source 1..16: mol_type = other DNA
ttagatgtatcctagc

SEQ ID NO: 46 - DNA, 16 bp, synthetic construct
  source 1..16: mol_type = other DNA
gttagatgtatcctag

SEQ ID NO: 47 - DNA, 16 bp, synthetic construct
  source 1..16: mol_type = other DNA
gatgttagatgtatcc

SEQ ID NO: 48 - DNA, 16 bp, synthetic construct
  source 1..16: mol_type = other DNA
gggaattgggctgtat

SEQ ID NO: 49 - DNA, 16 bp, synthetic construct
  source 1..16: mol_type = other DNA
gaatagtttgtccctc

SEQ ID NO: 50 - DNA, 16 bp, synthetic construct
  source 1..16: mol_type = other DNA
tggtgttcaataggct

SEQ ID NO: 51 - DNA, 16 bp, synthetic construct
  source 1..16: mol_type = other DNA
atggtgttcaataggc

SEQ ID NO: 52 - DNA, 16 bp, synthetic construct
  source 1..16: mol_type = other DNA
gaaacctcatcatccg

SEQ ID NO: 53 - DNA, 16 bp, synthetic construct
  source 1..16: mol_type = other DNA
atcacccgctgatggt

SEQ ID NO: 54 - DNA, 16 bp, synthetic construct
  source 1..16: mol_type = other DNA
atgagcatcacccgct

SEQ ID NO: 55 - DNA, 16 bp, synthetic construct
  source 1..16: mol_type = other DNA
atcggctcttattagc

SEQ ID NO: 56 - DNA, 16 bp, synthetic construct
  source 1..16: mol_type = other DNA
gatcggctcttattag

SEQ ID NO: 57 - DNA, 16 bp, synthetic construct
  source 1..16: mol_type = other DNA
accaccaatcccgatc

SEQ ID NO: 58 - DNA, 16 bp, synthetic construct
  source 1..16: mol_type = other DNA
taccaccaatcccgat

SEQ ID NO: 59 - DNA, 16 bp, synthetic construct
  source 1..16: mol_type = other DNA
ctaccaccaatcccga

SEQ ID NO: 60 - DNA, 16 bp, synthetic construct
  source 1..16: mol_type = other DNA
ccgctccacaagacac

SEQ ID NO: 61 - DNA, 16 bp, synthetic construct
  source 1..16: mol_type = other DNA
atcggctcttattagc

SEQ ID NO: 62 - DNA, 16 bp, synthetic construct
  source 1..16: mol_type = other DNA
gatcggctcttattag

SEQ ID NO: 63 - DNA, 16 bp, synthetic construct
  source 1..16: mol_type = other DNA
accaccaatcccgatc

SEQ ID NO: 64 - DNA, 16 bp, synthetic construct
  source 1..16: mol_type = other DNA
ccgctccacaagacac

SEQ ID NO: 65 - DNA, 16 bp, synthetic construct
  source 1..16: mol_type = other DNA
atcggctcttattagc

SEQ ID NO: 66 - DNA, 16 bp, synthetic construct
  source 1..16: mol_type = other DNA
gatcggctcttattag

SEQ ID NO: 67 - DNA, 16 bp, synthetic construct
  source 1..16: mol_type = other DNA
gaagttaggctcatgg

SEQ ID NO: 68 - DNA, 16 bp, synthetic construct
  source 1..16: mol_type = other DNA
gtcacacgaatacctg

SEQ ID NO: 69 - DNA, 16 bp, synthetic construct
  source 1..16: mol_type = other DNA
agtcacacgaatacct

SEQ ID NO: 70 - DNA, 16 bp, synthetic construct
  source 1..16: mol_type = other DNA
cagtcacacgaatacc

SEQ ID NO: 71 - DNA, 16 bp, synthetic construct
  source 1..16: mol_type = other DNA
ggtctggttaggagtt

SEQ ID NO: 72 - DNA, 16 bp, synthetic construct
  source 1..16: mol_type = other DNA
tggtctggttaggagt

SEQ ID NO: 73 - DNA, 16 bp, synthetic construct
  source 1..16: mol_type = other DNA
ttatatctggagaccc

SEQ ID NO: 74 - DNA, 16 bp, synthetic construct
  source 1..16: mol_type = other DNA
gatagtgtatggcttg

SEQ ID NO: 75 - DNA, 17 bp, synthetic construct
  source 1..17: mol_type = other DNA
ggatgctgcttgtaatc

SEQ ID NO: 76 - DNA, 17 bp, synthetic construct
  source 1..17: mol_type = other DNA
gatcatgtttgccttgc

SEQ ID NO: 77 - DNA, 17 bp, synthetic construct
  source 1..17: mol_type = other DNA
gattgttctcaccaacc

SEQ ID NO: 78 - DNA, 17 bp, synthetic construct
  source 1..17: mol_type = other DNA
tgttagatgtatcctag

SEQ ID NO: 79 - DNA, 17 bp, synthetic construct
  source 1..17: mol_type = other DNA
tagaatagtttgtccct

SEQ ID NO: 80 - DNA, 17 bp, synthetic construct
  source 1..17: mol_type = other DNA
agaagcatcctgactgc

SEQ ID NO: 81 - DNA, 18 bp, synthetic construct
  source 1..18: mol_type = other DNA
ttgtagagtgtgagccct

SEQ ID NO: 82 - DNA, 18 bp, synthetic construct
  source 1..18: mol_type = other DNA
agatcatgtttgccttgc

SEQ ID NO: 83 - DNA, 18 bp, synthetic construct
  source 1..18: mol_type = other DNA
gacagctagagataactc

SEQ ID NO: 84 - DNA, 18 bp, synthetic construct
  source 1..18: mol_type = other DNA
gagatacaagagttctac

SEQ ID NO: 85 - DNA, 18 bp, synthetic construct
  source 1..18: mol_type = other DNA
tcatcagaacctcacttg

SEQ ID NO: 86 - DNA, 18 bp, synthetic construct
  source 1..18: mol_type = other DNA
actcttcaagcactggac

SEQ ID NO: 87 - DNA, 18 bp, synthetic construct
  source 1..18: mol_type = other DNA
ttgacagtcccacgccca

SEQ ID NO: 88 - DNA, 18 bp, synthetic construct
  source 1..18: mol_type = other DNA
gcccaggaaagaacttca

SEQ ID NO: 89 - DNA, 18 bp, synthetic construct
  source 1..18: mol_type = other DNA
gacgtgatatgcctgtat

SEQ ID NO: 90 - DNA, 18 bp, synthetic construct
  source 1..18: mol_type = other DNA
catgatagtgtatggctt

SEQ ID NO: 91 - DNA, 19 bp, synthetic construct
  source 1..19: mol_type = other DNA
gatgctgcttgtaatccat

SEQ ID NO: 92 - DNA, 19 bp, synthetic construct
  source 1..19: mol_type = other DNA
ctggatgctgcttgtaatc

SEQ ID NO: 93 - DNA, 19 bp, synthetic construct
  source 1..19: mol_type = other DNA
gggtctgtcttctgctgga

SEQ ID NO: 94 - DNA, 19 bp, synthetic construct
  source 1..19: mol_type = other DNA
tttgtagagtgtgagccct

SEQ ID NO: 95 - DNA, 19 bp, synthetic construct
  source 1..19: mol_type = other DNA
gaattactgcaaatcagcc

SEQ ID NO: 96 - DNA, 19 bp, synthetic construct
  source 1..19: mol_type = other DNA
gattgttctcaccaacccg

SEQ ID NO: 97 - DNA, 19 bp, synthetic construct
  source 1..19: mol_type = other DNA
actgaatctgcgttgttgg

SEQ ID NO: 98 - DNA, 19 bp, synthetic construct
  source 1..19: mol_type = other DNA
gaactgaatctgcgttgtt

SEQ ID NO: 99 - DNA, 19 bp, synthetic construct
  source 1..19: mol_type = other DNA
tcatgggaattgggctgta

SEQ ID NO: 100 - DNA, 19 bp, synthetic construct
  source 1..19: mol_type = other DNA
gcacagatactcttcaagc

SEQ ID NO: 101 - DNA, 19 bp, synthetic construct
  source 1..19: mol_type = other DNA
tcttaacccagaaccctta

SEQ ID NO: 102 - DNA, 19 bp, synthetic construct
  source 1..19: mol_type = other DNA
tggaaatctaccaccaatc

SEQ ID NO: 103 - DNA, 19 bp, synthetic construct
  source 1..19: mol_type = other DNA
gacgtgatatgcctgtatc

SEQ ID NO: 104 - DNA, 19 bp, synthetic construct
  source 1..19: mol_type = other DNA
tgatagtgtatggcttggt

SEQ ID NO: 105 - DNA, 20 bp, synthetic construct
  source 1..20: mol_type = other DNA
gatgctgcttgtaatccatt

SEQ ID NO: 106 - DNA, 20 bp, synthetic construct
  source 1..20: mol_type = other DNA
tgtagagtgtgagccctggt

SEQ ID NO: 107 - DNA, 20 bp, synthetic construct
  source 1..20: mol_type = other DNA
atgtttgccttgcttagaga

SEQ ID NO: 108 - DNA, 20 bp, synthetic construct
  source 1..20: mol_type = other DNA
atctgcgttgttgggaagcc

SEQ ID NO: 109 - DNA, 20 bp, synthetic construct
  source 1..20: mol_type = other DNA
gatacaagagttctacttag

SEQ ID NO: 110 - DNA, 20 bp, synthetic construct
  source 1..20: mol_type = other DNA
tgcacagatactcttcaagc

SEQ ID NO: 111 - DNA, 20 bp, synthetic construct
  source 1..20: mol_type = other DNA
ccttccagttcctgcacaaa

SEQ ID NO: 112 - DNA, 16 bp, synthetic construct
  source 1..16: mol_type = other DNA
gatgtgcttatactgc

SEQ ID NO: 113 - DNA, 16 bp, synthetic construct
  source 1..16: mol_type = other DNA
ggcactcaactctatg

SEQ ID NO: 114 - DNA, 16 bp, synthetic construct
  source 1..16: mol_type = other DNA
accagtctattgtaac

SEQ ID NO: 115 - DNA, 16 bp, synthetic construct
  source 1..16: mol_type = other DNA
gcataaccagtctatt

SEQ ID NO: 116 - DNA, 16 bp, synthetic construct
  source 1..16: mol_type = other DNA
ggcataaccagtctat

SEQ ID NO: 117 - DNA, 16 bp, synthetic construct
  source 1..16: mol_type = other DNA
cttaattgccaactag

SEQ ID NO: 118 - DNA, 16 bp, synthetic construct
  source 1..16: mol_type = other DNA
gtgccttgtgactagt

SEQ ID NO: 119 - DNA, 16 bp, synthetic construct
  source 1..16: mol_type = other DNA
gattaacaccaattgc

SEQ ID NO: 120 - DNA, 16 bp, synthetic construct
  source 1..16: mol_type = other DNA
accctatgctactgta

SEQ ID NO: 121 - DNA, 16 bp, synthetic construct
  source 1..16: mol_type = other DNA
taaccctatgctactg

SEQ ID NO: 122 - DNA, 16 bp, synthetic construct
  source 1..16: mol_type = other DNA
gtttaaccctatgcta

SEQ ID NO: 123 - DNA, 16 bp, synthetic construct
  source 1..16: mol_type = other DNA
agtttaaccctatgct

SEQ ID NO: 124 - DNA, 16 bp, synthetic construct
  source 1..16: mol_type = other DNA
cagtttaaccctatgc

SEQ ID NO: 125 - DNA, 16 bp, synthetic construct
  source 1..16: mol_type = other DNA
acagtttaaccctatg

SEQ ID NO: 126 - DNA, 16 bp, synthetic construct
  source 1..16: mol_type = other DNA
cccattagcctatatg

SEQ ID NO: 127 - DNA, 16 bp, synthetic construct
  source 1..16: mol_type = other DNA
gcaccagtatgacatt

SEQ ID NO: 128 - DNA, 16 bp, synthetic construct
  source 1..16: mol_type = other DNA
atgttgagccatgccc

SEQ ID NO: 129 - DNA, 16 bp, synthetic construct
  source 1..16: mol_type = other DNA
gatgttgagccatgcc

SEQ ID NO: 130 - DNA, 16 bp, synthetic construct
  source 1..16: mol_type = other DNA
caccagatgttgagcc

SEQ ID NO: 131 - DNA, 16 bp, synthetic construct
  source 1..16: mol_type = other DNA
ggcttgatgtgtcctc

SEQ ID NO: 132 - DNA, 16 bp, synthetic construct
  source 1..16: mol_type = other DNA
gtggcttgatgtgtcc

SEQ ID NO: 133 - DNA, 16 bp, synthetic construct
  source 1..16: mol_type = other DNA
gagcctaatgtatgcc

SEQ ID NO: 134 - DNA, 16 bp, synthetic construct
  source 1..16: mol_type = other DNA
gttactaagccaatct

SEQ ID NO: 135 - DNA, 16 bp, synthetic construct
  source 1..16: mol_type = other DNA
tagtcctcctagcagc

SEQ ID NO: 136 - DNA, 16 bp, synthetic construct
  source 1..16: mol_type = other DNA
atgttagtcctcctag

SEQ ID NO: 137 - DNA, 16 bp, synthetic construct
  source 1..16: mol_type = other DNA
gtaccatatgttagtc

SEQ ID NO: 138 - DNA, 16 bp, synthetic construct
  source 1..16: mol_type = other DNA
gagtaccatatgttag

SEQ ID NO: 139 - DNA, 16 bp, synthetic construct
  source 1..16: mol_type = other DNA
aacagtcagagtatcc

SEQ ID NO: 140 - DNA, 16 bp, synthetic construct
  source 1..16: mol_type = other DNA
taactatgaggtcacc

SEQ ID NO: 141 - DNA, 16 bp, synthetic construct
  source 1..16: mol_type = other DNA
tataatgctagatccc

SEQ ID NO: 142 - DNA, 16 bp, synthetic construct
  source 1..16: mol_type = other DNA
gtataatgctagatcc

SEQ ID NO: 143 - DNA, 16 bp, synthetic construct
  source 1..16: mol_type = other DNA
tcattgttaggaccac

SEQ ID NO: 144 - DNA, 16 bp, synthetic construct
  source 1..16: mol_type = other DNA
aggtcactctagtaac

SEQ ID NO: 145 - DNA, 16 bp, synthetic construct
  source 1..16: mol_type = other DNA
taggtcactctagtaa

SEQ ID NO: 146 - DNA, 16 bp, synthetic construct
  source 1..16: mol_type = other DNA
ataggtcactctagta

SEQ ID NO: 147 - DNA, 16 bp, synthetic construct
  source 1..16: mol_type = other DNA
aataggtcactctagt

SEQ ID NO: 148 - DNA, 16 bp, synthetic construct
  source 1..16: mol_type = other DNA
gggaaataggtcactc

SEQ ID NO: 149 - DNA, 16 bp, synthetic construct
  source 1..16: mol_type = other DNA
atgtccaatcctacac

SEQ ID NO: 150 - DNA, 16 bp, synthetic construct
  source 1..16: mol_type = other DNA
gccatgtccaatccta

SEQ ID NO: 151 - DNA, 16 bp, synthetic construct
  source 1..16: mol_type = other DNA
ggtttagtagggatat

SEQ ID NO: 152 - DNA, 16 bp, synthetic construct
  source 1..16: mol_type = other DNA
ttagggtttagtaggg

SEQ ID NO: 153 - DNA, 16 bp, synthetic construct
  source 1..16: mol_type = other DNA
gtctttgaccagtgta

SEQ ID NO: 154 - DNA, 16 bp, synthetic construct
  source 1..16: mol_type = other DNA
gggttgcatgaggtgt

SEQ ID NO: 155 - DNA, 16 bp, synthetic construct
  source 1..16: mol_type = other DNA
caattcactggttgga

SEQ ID NO: 156 - DNA, 16 bp, synthetic construct
  source 1..16: mol_type = other DNA
gatctaactatccacc

SEQ ID NO: 157 - DNA, 16 bp, synthetic construct
  source 1..16: mol_type = other DNA
tagactgcaactaagt

SEQ ID NO: 158 - DNA, 16 bp, synthetic construct
  source 1..16: mol_type = other DNA
gtgtggctcattaggc

SEQ ID NO: 159 - DNA, 16 bp, synthetic construct
  source 1..16: mol_type = other DNA
tacatctcatagtacc

SEQ ID NO: 160 - DNA, 16 bp, synthetic construct
  source 1..16: mol_type = other DNA
ctacatctcatagtac

SEQ ID NO: 161 - DNA, 16 bp, synthetic construct
  source 1..16: mol_type = other DNA
cctacatctcatagta

SEQ ID NO: 162 - DNA, 16 bp, synthetic construct
  source 1..16: mol_type = other DNA
gtgtggaacttatcaa

SEQ ID NO: 163 - DNA, 16 bp, synthetic construct
  source 1..16: mol_type = other DNA
ctgtgtggaacttatc

SEQ ID NO: 164 - DNA, 16 bp, synthetic construct
  source 1..16: mol_type = other DNA
gatatgcaccatccat

SEQ ID NO: 165 - DNA, 16 bp, synthetic construct
  source 1..16: mol_type = other DNA
atgatatgcaccatcc

SEQ ID NO: 166 - DNA, 16 bp, synthetic construct
  source 1..16: mol_type = other DNA
gccagccttagtttaa

SEQ ID NO: 167 - DNA, 16 bp, synthetic construct
  source 1..16: mol_type = other DNA
attagagttggcatac

SEQ ID NO: 168 - DNA, 16 bp, synthetic construct
  source 1..16: mol_type = other DNA
gtctaagttgcaggag

SEQ ID NO: 169 - DNA, 16 bp, synthetic construct
  source 1..16: mol_type = other DNA
tagtctaagttgcagg

SEQ ID NO: 170 - DNA, 16 bp, synthetic construct
  source 1..16: mol_type = other DNA
atgagtaccagcaacc

SEQ ID NO: 171 - DNA, 16 bp, synthetic construct
  source 1..16: mol_type = other DNA
gatggcaatgagtacc

SEQ ID NO: 172 - DNA, 16 bp, synthetic construct
  source 1..16: mol_type = other DNA
ataggacatcagttgc

SEQ ID NO: 173 - DNA, 16 bp, synthetic construct
  source 1..16: mol_type = other DNA
gcatcaattagatctc

SEQ ID NO: 174 - DNA, 16 bp, synthetic construct
  source 1..16: mol_type = other DNA
ggcatcaattagatct

SEQ ID NO: 175 - DNA, 17 bp, synthetic construct
  source 1..17: mol_type = other DNA
accaaatgatgtgctta

SEQ ID NO: 176 - DNA, 17 bp, synthetic construct
  source 1..17: mol_type = other DNA
caccaaatgatgtgctt

SEQ ID NO: 177 - DNA, 17 bp, synthetic construct
  source 1..17: mol_type = other DNA
acaccaaatgatgtgct

SEQ ID NO: 178 - DNA, 17 bp, synthetic construct
  source 1..17: mol_type = other DNA
gacaccaaatgatgtgc

SEQ ID NO: 179 - DNA, 17 bp, synthetic construct
  source 1..17: mol_type = other DNA
tgacaccaaatgatgtg

SEQ ID NO: 180 - DNA, 17 bp, synthetic construct
  source 1..17: mol_type = other DNA
actcaactctatgacac

SEQ ID NO: 181 - DNA, 17 bp, synthetic construct
  source 1..17: mol_type = other DNA
cactcaactctatgaca

SEQ ID NO: 182 - DNA, 17 bp, synthetic construct
  source 1..17: mol_type = other DNA
gcactcaactctatgac

SEQ ID NO: 183 - DNA, 17 bp, synthetic construct
  source 1..17: mol_type = other DNA
ggcactcaactctatga

SEQ ID NO: 184 - DNA, 17 bp, synthetic construct
  source 1..17: mol_type = other DNA
cagaagcaactaatttc

SEQ ID NO: 185 - DNA, 17 bp, synthetic construct
  source 1..17: mol_type = other DNA
ccagaagcaactaattt

SEQ ID NO: 186 - DNA, 17 bp, synthetic construct
  source 1..17: mol_type = other DNA
cccagaagcaactaatt

SEQ ID NO: 187 - DNA, 17 bp, synthetic construct
  source 1..17: mol_type = other DNA
gcctcactgttactaaa

SEQ ID NO: 188 - DNA, 17 bp, synthetic construct
  source 1..17: mol_type = other DNA
cttgtggtgggatggtg

SEQ ID NO: 189 - DNA, 17 bp, synthetic construct
  source 1..17: mol_type = other DNA
tcttgtggtgggatggt

SEQ ID NO: 190 - DNA, 17 bp, synthetic construct
  source 1..17: mol_type = other DNA
ttcttgtggtgggatgg

SEQ ID NO: 191 - DNA, 17 bp, synthetic construct
  source 1..17: mol_type = other DNA
tactcacactatattgc

SEQ ID NO: 192 - DNA, 17 bp, synthetic construct
  source 1..17: mol_type = other DNA
gaccttagagaatactc

SEQ ID NO: 193 - DNA, 17 bp, synthetic construct
  source 1..17: mol_type = other DNA
tgaccttagagaatact

SEQ ID NO: 194 - DNA, 17 bp, synthetic construct
  source 1..17: mol_type = other DNA
ttgaccttagagaatac

SEQ ID NO: 195 - DNA, 17 bp, synthetic construct
  source 1..17: mol_type = other DNA
agcatatcttactgttc

SEQ ID NO: 196 - DNA, 17 bp, synthetic construct
  source 1..17: mol_type = other DNA
ccactttaagtaagcat

SEQ ID NO: 197 - DNA, 17 bp, synthetic construct
  source 1..17: mol_type = other DNA
tccactttaagtaagca

SEQ ID NO: 198 - DNA, 17 bp, synthetic construct
  source 1..17: mol_type = other DNA
gcctatatgattatcag

SEQ ID NO: 199 - DNA, 17 bp, synthetic construct
  source 1..17: mol_type = other DNA
ccattagcctatatgat

SEQ ID NO: 200 - DNA, 17 bp, synthetic construct
  source 1..17: mol_type = other DNA
cccattagcctatatga

SEQ ID NO: 201 - DNA, 17 bp, synthetic construct
  source 1..17: mol_type = other DNA
tcccattagcctatatg

SEQ ID NO: 202 - DNA, 17 bp, synthetic construct
  source 1..17: mol_type = other DNA
ctcaccacagtatagta

SEQ ID NO: 203 - DNA, 17 bp, synthetic construct
  source 1..17: mol_type = other DNA
tctcaccacagtatagt

SEQ ID NO: 204 - DNA, 17 bp, synthetic construct
  source 1..17: mol_type = other DNA
atctcaccacagtatag

SEQ ID NO: 205 - DNA, 17 bp, synthetic construct
  source 1..17: mol_type = other DNA
catctcaccacagtata

SEQ ID NO: 206 - DNA, 17 bp, synthetic construct
  source 1..17: mol_type = other DNA
tcatctcaccacagtat

SEQ ID NO: 207 - DNA, 17 bp, synthetic construct
  source 1..17: mol_type = other DNA
gtcatctcaccacagta

SEQ ID NO: 208 - DNA, 17 bp, synthetic construct
  source 1..17: mol_type = other DNA
tagagaagcaccaaact

SEQ ID NO: 209 - DNA, 17 bp, synthetic construct
  source 1..17: mol_type = other DNA
ttagagaagcaccaaac

SEQ ID NO: 210 - DNA, 17 bp, synthetic construct
  source 1..17: mol_type = other DNA
gggtgttgtaatttgta

SEQ ID NO: 211 - DNA, 17 bp, synthetic construct
  source 1..17: mol_type = other DNA
caggaacttaacaaagt

SEQ ID NO: 212 - DNA, 17 bp, synthetic construct
  source 1..17: mol_type = other DNA
accagatgttgagccat

SEQ ID NO: 213 - DNA, 17 bp, synthetic construct
  source 1..17: mol_type = other DNA
caccagatgttgagcca

SEQ ID NO: 214 - DNA, 17 bp, synthetic construct
  source 1..17: mol_type = other DNA
gttaggaccacagatag

SEQ ID NO: 215 - DNA, 17 bp, synthetic construct
  source 1..17: mol_type = other DNA
gcatatctgtaccatac

SEQ ID NO: 216 - DNA, 17 bp, synthetic construct
  source 1..17: mol_type = other DNA
aaacttgttctgtgcca

SEQ ID NO: 217 - DNA, 17 bp, synthetic construct
  source 1..17: mol_type = other DNA
agaacaattcactggtt

SEQ ID NO: 218 - DNA, 17 bp, synthetic construct
  source 1..17: mol_type = other DNA
catcagatcatggcaaa

SEQ ID NO: 219 - DNA, 17 bp, synthetic construct
  source 1..17: mol_type = other DNA
ccctacatctcatagta

SEQ ID NO: 220 - DNA, 17 bp, synthetic construct
  source 1..17: mol_type = other DNA
gtcagcatctagcaaat

SEQ ID NO: 221 - DNA, 17 bp, synthetic construct
  source 1..17: mol_type = other DNA
ctattagtctaagttgc

SEQ ID NO: 222 - DNA, 17 bp, synthetic construct
  source 1..17: mol_type = other DNA
cactaacaaggctgttc

SEQ ID NO: 223 - DNA, 18 bp, synthetic construct
  source 1..18: mol_type = other DNA
gacaccaaatgatgtgct

SEQ ID NO: 224 - DNA, 18 bp, synthetic construct
  source 1..18: mol_type = other DNA
tggcactcaactctatga

SEQ ID NO: 225 - DNA, 18 bp, synthetic construct
  source 1..18: mol_type = other DNA
catccataggagattgat

SEQ ID NO: 226 - DNA, 18 bp, synthetic construct
  source 1..18: mol_type = other DNA
tgtataatgctagatccc

SEQ ID NO: 227 - DNA, 18 bp, synthetic construct
  source 1..18: mol_type = other DNA
tgtgtgaacaatgtggtg

SEQ ID NO: 228 - DNA, 18 bp, synthetic construct
  source 1..18: mol_type = other DNA
caaaccttacctatagtg

SEQ ID NO: 229 - DNA, 18 bp, synthetic construct
  source 1..18: mol_type = other DNA
gtgaactttagaccaatg

SEQ ID NO: 230 - DNA, 18 bp, synthetic construct
  source 1..18: mol_type = other DNA
atctcgatctctatagca

SEQ ID NO: 231 - DNA, 18 bp, synthetic construct
  source 1..18: mol_type = other DNA
aacacggcttctcaccag

SEQ ID NO: 232 - DNA, 18 bp, synthetic construct
  source 1..18: mol_type = other DNA
cactaacaaggctgttca

SEQ ID NO: 233 - DNA, 19 bp, synthetic construct
  source 1..19: mol_type = other DNA
atgacaccaaatgatgtgc

SEQ ID NO: 234 - DNA, 19 bp, synthetic construct
  source 1..19: mol_type = other DNA
ccagaagcaactaatttca

SEQ ID NO: 235 - DNA, 19 bp, synthetic construct
  source 1..19: mol_type = other DNA
gcataaccagtctattgta

SEQ ID NO: 236 - DNA, 19 bp, synthetic construct
  source 1..19: mol_type = other DNA
ctacagaaggatgcaaatc

SEQ ID NO: 237 - DNA, 19 bp, synthetic construct
  source 1..19: mol_type = other DNA
cacttaattgccaactaga

SEQ ID NO: 238 - DNA, 19 bp, synthetic construct
  source 1..19: mol_type = other DNA
cattctatttgctgtgaca

SEQ ID NO: 239 - DNA, 19 bp, synthetic construct
  source 1..19: mol_type = other DNA
ggttgtttgtgctggtctc

SEQ ID NO: 240 - DNA, 19 bp, synthetic construct
  source 1..19: mol_type = other DNA
acagtttaaccctatgcta

SEQ ID NO: 241 - DNA, 19 bp, synthetic construct
  source 1..19: mol_type = other DNA
tgatctgcaaccacaagta

SEQ ID NO: 242 - DNA, 19 bp, synthetic construct
  source 1..19: mol_type = other DNA
gtagtaggtgtagatatgc

SEQ ID NO: 243 - DNA, 19 bp, synthetic construct
  source 1..19: mol_type = other DNA
caggcatcaattagatctc

SEQ ID NO: 244 - DNA, 20 bp, synthetic construct
  source 1..20: mol_type = other DNA
cacttaattgccaactagaa

SEQ ID NO: 245 - DNA, 20 bp, synthetic construct
  source 1..20: mol_type = other DNA
gtttaaccctatgctactgt

SEQ ID NO: 246 - DNA, 20 bp, synthetic construct
  source 1..20: mol_type = other DNA
attgcatatctgtaccatac

SEQ ID NO: 247 - DNA, 20 bp, synthetic construct
  source 1..20: mol_type = other DNA
agtgctacaaactattcagt

SEQ ID NO: 248 - DNA, 20 bp, synthetic construct
  source 1..20: mol_type = other DNA
tgcaagcatttattctagtg

SEQ ID NO: 249 - DNA, 20 bp, synthetic construct
  source 1..20: mol_type = other DNA
cctgacctacatttgcaact

SEQ ID NO: 250 - DNA, 20 bp, synthetic construct
  source 1..20: mol_type = other DNA
gcctgacctacatttgcaac

SEQ ID NO: 251 - DNA, 20 bp, synthetic construct
  source 1..20: mol_type = other DNA
tggtataacaaattagggcc

SEQ ID NO: 252 - DNA, 20 bp, synthetic construct
  source 1..20: mol_type = other DNA
atggtataacaaattagggc

SEQ ID NO: 253 - DNA, 20 bp, synthetic construct
  source 1..20: mol_type = other DNA
gatatgcaccatccatcaat

SEQ ID NO: 254 - DNA, 20 bp, synthetic construct
  source 1..20: mol_type = other DNA
tgatatgcaccatccatcaa

SEQ ID NO: 255 - DNA, 20 bp, synthetic construct
  source 1..20: mol_type = other DNA
attgccagccttagtttaaa

SEQ ID NO: 256 - DNA, 20 bp, synthetic construct
  source 1..20: mol_type = other DNA
cattgccagccttagtttaa

SEQ ID NO: 257 - DNA, 20 bp, synthetic construct
  source 1..20: mol_type = other DNA
tcattgccagccttagttta

SEQ ID NO: 258 - DNA, 20 bp, synthetic construct
  source 1..20: mol_type = other DNA
aactgctggaaacctcactt

SEQ ID NO: 259 - DNA, 20 bp, synthetic construct
  source 1..20: mol_type = other DNA
gaactgctggaaacctcact

SEQ ID NO: 260 - DNA, 20 bp, synthetic construct
  source 1..20: mol_type = other DNA
ttagtctaagttgcaggagt

SEQ ID NO: 261 - DNA, 20 bp, synthetic construct
  source 1..20: mol_type = other DNA
attagtctaagttgcaggag

SEQ ID NO: 262 - DNA, 20 bp, synthetic construct
  source 1..20: mol_type = other DNA
tattagtctaagttgcagga

SEQ ID NO: 263 - DNA, 20 bp, synthetic construct
  source 1..20: mol_type = other DNA
ctattagtctaagttgcagg

SEQ ID NO: 264 - DNA, 20 bp, synthetic construct
  source 1..20: mol_type = other DNA
ttgatggcaatgagtaccag

SEQ ID NO: 265 - DNA, 20 bp, synthetic construct
  source 1..20: mol_type = other DNA
gttgatggcaatgagtacca

SEQ ID NO: 266 - DNA, 20 bp, synthetic construct
  source 1..20: mol_type = other DNA
agttgatggcaatgagtacc

SEQ ID NO: 267 - DNA, 20 bp, synthetic construct
  source 1..20: mol_type = other DNA
aagttgatggcaatgagtac

SEQ ID NO: 268 - DNA, 20 bp, synthetic construct
  source 1..20: mol_type = other DNA
acatcagttgcagaaggact

SEQ ID NO: 269 - DNA, 20 bp, synthetic construct
  source 1..20: mol_type = other DNA
ccaggcatcaattagatctc

SEQ ID NO: 270 - DNA, 20 bp, synthetic construct
  source 1..20: mol_type = other DNA
ccactaacaaggctgttcag

SEQ ID NO: 271 - DNA, 20 bp, synthetic construct
  source 1..20: mol_type = other DNA
accactaacaaggctgttca

SEQ ID NO: 272 - DNA, 20 bp, synthetic construct
  source 1..20: mol_type = other DNA
aaccactaacaaggctgttc

SEQ ID NO: 273 - DNA, 20 bp, synthetic construct
  source 1..20: mol_type = other DNA
aaaccactaacaaggctgtt

SEQ ID NO: 274 - DNA, 20 bp, synthetic construct
  source 1..20: mol_type = other DNA
taaaccactaacaaggctgt

SEQ ID NO: 275 - DNA, 16 bp, synthetic construct
  source 1..16: mol_type = other DNA
ggtctcactaaagggt

SEQ ID NO: 276 - DNA, 16 bp, synthetic construct
  source 1..16: mol_type = other DNA
cgatcttcaaagggac

SEQ ID NO: 277 - DNA, 16 bp, synthetic construct
  source 1..16: mol_type = other DNA
gcgatcttcaaaggga

SEQ ID NO: 278 - DNA, 16 bp, synthetic construct
  source 1..16: mol_type = other DNA
aggcgatcttcaaagg

SEQ ID NO: 279 - DNA, 16 bp, synthetic construct
  source 1..16: mol_type = other DNA
tagtgaggcgatcttc

SEQ ID NO: 280 - DNA, 16 bp, synthetic construct
  source 1..16: mol_type = other DNA
ctagtgaggcgatctt

SEQ ID NO: 281 - DNA, 16 bp, synthetic construct
  source 1..16: mol_type = other DNA
tctagtgaggcgatct

SEQ ID NO: 282 - DNA, 16 bp, synthetic construct
  source 1..16: mol_type = other DNA
atcaactaaagcaccc

SEQ ID NO: 283 - DNA, 16 bp, synthetic construct
  source 1..16: mol_type = other DNA
gccctatgttagtatc

SEQ ID NO: 284 - DNA, 16 bp, synthetic construct
  source 1..16: mol_type = other DNA
tgccctatgttagtat

SEQ ID NO: 285 - DNA, 16 bp, synthetic construct
  source 1..16: mol_type = other DNA
ttgccctatgttagta

SEQ ID NO: 286 - DNA, 16 bp, synthetic construct
  source 1..16: mol_type = other DNA
gtttgccctatgttag

SEQ ID NO: 287 - DNA, 16 bp, synthetic construct
  source 1..16: mol_type = other DNA
ctttaaggcgtgattt

SEQ ID NO: 288 - DNA, 16 bp, synthetic construct
  source 1..16: mol_type = other DNA
ttcttacagagcaacg

SEQ ID NO: 289 - DNA, 16 bp, synthetic construct
  source 1..16: mol_type = other DNA
gcaggatgagtagttc

SEQ ID NO: 290 - DNA, 16 bp, synthetic construct
  source 1..16: mol_type = other DNA
acaataggtggtatac

SEQ ID NO: 291 - DNA, 16 bp, synthetic construct
  source 1..16: mol_type = other DNA
gttacaataggtggta

SEQ ID NO: 292 - DNA, 16 bp, synthetic construct
  source 1..16: mol_type = other DNA
ggttacaataggtggt

SEQ ID NO: 293 - DNA, 16 bp, synthetic construct
  source 1..16: mol_type = other DNA
agctctgtatcgcaaa

SEQ ID NO: 294 - DNA, 16 bp, synthetic construct
  source 1..16: mol_type = other DNA
aagctctgtatcgcaa

SEQ ID NO: 295 - DNA, 16 bp, synthetic construct
  source 1..16: mol_type = other DNA
caagctctgtatcgca

SEQ ID NO: 296 - DNA, 16 bp, synthetic construct
  source 1..16: mol_type = other DNA
tcaagctctgtatcgc

SEQ ID NO: 297 - DNA, 16 bp, synthetic construct
  source 1..16: mol_type = other DNA
atcaagctctgtatcg

SEQ ID NO: 298 - DNA, 16 bp, synthetic construct
  source 1..16: mol_type = other DNA
gtaatgagagttatcc

SEQ ID NO: 299 - DNA, 16 bp, synthetic construct
  source 1..16: mol_type = other DNA
atgatcctcctatgac

SEQ ID NO: 300 - DNA, 16 bp, synthetic construct
  source 1..16: mol_type = other DNA
ggctatgatcctccta

SEQ ID NO: 301 - DNA, 16 bp, synthetic construct
  source 1..16: mol_type = other DNA
ttgtaggagcagcata

SEQ ID NO: 302 - DNA, 16 bp, synthetic construct
  source 1..16: mol_type = other DNA
gtcaaccatttgtagg

SEQ ID NO: 303 - DNA, 16 bp, synthetic construct
  source 1..16: mol_type = other DNA
caatcctacctattga

SEQ ID NO: 304 - DNA, 16 bp, synthetic construct
  source 1..16: mol_type = other DNA
tatgtggtaacaatcc

SEQ ID NO: 305 - DNA, 16 bp, synthetic construct
  source 1..16: mol_type = other DNA
gtatgtggtaacaatc

SEQ ID NO: 306 - DNA, 16 bp, synthetic construct
  source 1..16: mol_type = other DNA
gtgtattgggagtatg

SEQ ID NO: 307 - DNA, 16 bp, synthetic construct
  source 1..16: mol_type = other DNA
gtccatccaagtcatg

SEQ ID NO: 308 - DNA, 16 bp, synthetic construct
  source 1..16: mol_type = other DNA
aatcttgagctactac

SEQ ID NO: 309 - DNA, 16 bp, synthetic construct
  source 1..16: mol_type = other DNA
gtgaggttccgataaa

SEQ ID NO: 310 - DNA, 16 bp, synthetic construct
  source 1..16: mol_type = other DNA
ggtgaggttccgataa

SEQ ID NO: 311 - DNA, 16 bp, synthetic construct
  source 1..16: mol_type = other DNA
tggtgaggttccgata

SEQ ID NO: 312 - DNA, 16 bp, synthetic construct
  source 1..16: mol_type = other DNA
ggttggtgaggttccg

SEQ ID NO: 313 - DNA, 16 bp, synthetic construct
  source 1..16: mol_type = other DNA
gggttggtgaggttcc

SEQ ID NO: 314 - DNA, 16 bp, synthetic construct
  source 1..16: mol_type = other DNA
cacccgaagtttgcaa

SEQ ID NO: 315 - DNA, 16 bp, synthetic construct
  source 1..16: mol_type = other DNA
tcacccgaagtttgca

SEQ ID NO: 316 - DNA, 16 bp, synthetic construct
  source 1..16: mol_type = other DNA
ttcacccgaagtttgc

SEQ ID NO: 317 - DNA, 16 bp, synthetic construct
  source 1..16: mol_type = other DNA
tttcacccgaagtttg

SEQ ID NO: 318 - DNA, 16 bp, synthetic construct
  source 1..16: mol_type = other DNA
tacatttcacccgaag

SEQ ID NO: 319 - DNA, 16 bp, synthetic construct
  source 1..16: mol_type = other DNA
gctaatactaatgtcc

SEQ ID NO: 320 - DNA, 16 bp, synthetic construct
  source 1..16: mol_type = other DNA
ggctaatactaatgtc

SEQ ID NO: 321 - DNA, 16 bp, synthetic construct
  source 1..16: mol_type = other DNA
cataggtggtttccgg

SEQ ID NO: 322 - DNA, 16 bp, synthetic construct
  source 1..16: mol_type = other DNA
tcataggtggtttccg

SEQ ID NO: 323 - DNA, 16 bp, synthetic construct
  source 1..16: mol_type = other DNA
acctcagtacctgcgt

SEQ ID NO: 324 - DNA, 16 bp, synthetic construct
  source 1..16: mol_type = other DNA
aacctcagtacctgcg

SEQ ID NO: 325 - DNA, 16 bp, synthetic construct
  source 1..16: mol_type = other DNA
gtgtcccacctattag

SEQ ID NO: 326 - DNA, 16 bp, synthetic construct
  source 1..16: mol_type = other DNA
atagtaggttctaggg

SEQ ID NO: 327 - DNA, 16 bp, synthetic construct
  source 1..16: mol_type = other DNA
gatagtaggttctagg

SEQ ID NO: 328 - DNA, 16 bp, synthetic construct
  source 1..16: mol_type = other DNA
ggatagtaggttctag

SEQ ID NO: 329 - DNA, 16 bp, synthetic construct
  source 1..16: mol_type = other DNA
tggatagtaggttcta

SEQ ID NO: 330 - DNA, 16 bp, synthetic construct
  source 1..16: mol_type = other DNA
gtggatagtaggttct

SEQ ID NO: 331 - DNA, 16 bp, synthetic construct
  source 1..16: mol_type = other DNA
agtggatagtaggttc

SEQ ID NO: 332 - DNA, 16 bp, synthetic construct
  source 1..16: mol_type = other DNA
tagtggatagtaggtt

SEQ ID NO: 333 - DNA, 16 bp, synthetic construct
  source 1..16: mol_type = other DNA
gcatggtatagtggat

SEQ ID NO: 334 - DNA, 16 bp, synthetic construct
  source 1..16: mol_type = other DNA
cgaacacactcttcta

SEQ ID NO: 335 - DNA, 16 bp, synthetic construct
  source 1..16: mol_type = other DNA
gccaaacccgcacatg

SEQ ID NO: 336 - DNA, 16 bp, synthetic construct
  source 1..16: mol_type = other DNA
atgccaaacccgcaca

SEQ ID NO: 337 - DNA, 16 bp, synthetic construct
  source 1..16: mol_type = other DNA
tatgccaaacccgcac

SEQ ID NO: 338 - DNA, 16 bp, synthetic construct
  source 1..16: mol_type = other DNA
catatgccaaacccgc

SEQ ID NO: 339 - DNA, 16 bp, synthetic construct
  source 1..16: mol_type = other DNA
ccatatgccaaacccg

SEQ ID NO: 340 - DNA, 16 bp, synthetic construct
  source 1..16: mol_type = other DNA
acgtctatcaatggta

SEQ ID NO: 341 - DNA, 16 bp, synthetic construct
  source 1..16: mol_type = other DNA
gctagggctgattcat

SEQ ID NO: 342 - DNA, 16 bp, synthetic construct
  source 1..16: mol_type = other DNA
gactatgagtaattcc

SEQ ID NO: 343 - DNA, 16 bp, synthetic construct
  source 1..16: mol_type = other DNA
cacgatacatagcaat

SEQ ID NO: 344 - DNA, 16 bp, synthetic construct
  source 1..16: mol_type = other DNA
gtcagttagaagtcac

SEQ ID NO: 345 - DNA, 16 bp, synthetic construct
  source 1..16: mol_type = other DNA
gtatgacctggaccca

SEQ ID NO: 346 - DNA, 16 bp, synthetic construct
  source 1..16: mol_type = other DNA
agtatgacctggaccc

SEQ ID NO: 347 - DNA, 16 bp, synthetic construct
  source 1..16: mol_type = other DNA
tagtatgacctggacc

SEQ ID NO: 348 - DNA, 16 bp, synthetic construct
  source 1..16: mol_type = other DNA
ctctagtatgacctgg

SEQ ID NO: 349 - DNA, 16 bp, synthetic construct
  source 1..16: mol_type = other DNA
gctctagtatgacctg

SEQ ID NO: 350 - DNA, 16 bp, synthetic construct
  source 1..16: mol_type = other DNA
ttgctctagtatgacc

SEQ ID NO: 351 - DNA, 16 bp, synthetic construct
  source 1..16: mol_type = other DNA
cttgctctagtatgac

SEQ ID NO: 352 - DNA, 16 bp, synthetic construct
  source 1..16: mol_type = other DNA
cgtgaccaccagagat

SEQ ID NO: 353 - DNA, 16 bp, synthetic construct
  source 1..16: mol_type = other DNA
ccgtgaccaccagaga

SEQ ID NO: 354 - DNA, 16 bp, synthetic construct
  source 1..16: mol_type = other DNA
accgtgaccaccagag

SEQ ID NO: 355 - DNA, 16 bp, synthetic construct
  source 1..16: mol_type = other DNA
aaccgtgaccaccaga

SEQ ID NO: 356 - DNA, 16 bp, synthetic construct
  source 1..16: mol_type = other DNA
caaccgtgaccaccag

SEQ ID NO: 357 - DNA, 16 bp, synthetic construct
  source 1..16: mol_type = other DNA
aacaaccgtgaccacc

SEQ ID NO: 358 - DNA, 16 bp, synthetic construct
  source 1..16: mol_type = other DNA
caacaaccgtgaccac

SEQ ID NO: 359 - DNA, 16 bp, synthetic construct
  source 1..16: mol_type = other DNA
ccaacaaccgtgacca

SEQ ID NO: 360 - DNA, 16 bp, synthetic construct
  source 1..16: mol_type = other DNA
cccaacaaccgtgacc

SEQ ID NO: 361 - DNA, 16 bp, synthetic construct
  source 1..16: mol_type = other DNA
tcccaacaaccgtgac

SEQ ID NO: 362 - DNA, 16 bp, synthetic construct
  source 1..16: mol_type = other DNA
gactcccaacaaccgt

SEQ ID NO: 363 - DNA, 16 bp, synthetic construct
  source 1..16: mol_type = other DNA
tgactcccaacaaccg

SEQ ID NO: 364 - DNA, 16 bp, synthetic construct
  source 1..16: mol_type = other DNA
gccaactgccactagt

SEQ ID NO: 365 - DNA, 16 bp, synthetic construct
  source 1..16: mol_type = other DNA
gtggactaagattgct

SEQ ID NO: 366 - DNA, 16 bp, synthetic construct
  source 1..16: mol_type = other DNA
tgtggactaagattgc

SEQ ID NO: 367 - DNA, 16 bp, synthetic construct
  source 1..16: mol_type = other DNA
gttatctgagggaatc

SEQ ID NO: 368 - DNA, 16 bp, synthetic construct
  source 1..16: mol_type = other DNA
gtacttgtgttggtca

SEQ ID NO: 369 - DNA, 16 bp, synthetic construct
  source 1..16: mol_type = other DNA
agtgtacttgtgttgg

SEQ ID NO: 370 - DNA, 16 bp, synthetic construct
  source 1..16: mol_type = other DNA
cgacctcacagcaagg

SEQ ID NO: 371 - DNA, 16 bp, synthetic construct
  source 1..16: mol_type = other DNA
ccgacctcacagcaag

SEQ ID NO: 372 - DNA, 16 bp, synthetic construct
  source 1..16: mol_type = other DNA
tacaccgacctcacag

SEQ ID NO: 373 - DNA, 16 bp, synthetic construct
  source 1..16: mol_type = other DNA
atacaccgacctcaca

SEQ ID NO: 374 - DNA, 16 bp, synthetic construct
  source 1..16: mol_type = other DNA
aatacaccgacctcac

SEQ ID NO: 375 - DNA, 16 bp, synthetic construct
  source 1..16: mol_type = other DNA
tcaatacaccgacctc

SEQ ID NO: 376 - DNA, 16 bp, synthetic construct
  source 1..16: mol_type = other DNA
atcaatacaccgacct

SEQ ID NO: 377 - DNA, 16 bp, synthetic construct
  source 1..16: mol_type = other DNA
gatcaatacaccgacc

SEQ ID NO: 378 - DNA, 16 bp, synthetic construct
  source 1..16: mol_type = other DNA
gtatgaagtctgccca

SEQ ID NO: 379 - DNA, 16 bp, synthetic construct
  source 1..16: mol_type = other DNA
agtatgaagtctgccc

SEQ ID NO: 380 - DNA, 16 bp, synthetic construct
  source 1..16: mol_type = other DNA
tgtctttcggagctac

SEQ ID NO: 381 - DNA, 16 bp, synthetic construct
  source 1..16: mol_type = other DNA
ctgtctttcggagcta

SEQ ID NO: 382 - DNA, 16 bp, synthetic construct
  source 1..16: mol_type = other DNA
actaggaggtaatctg

SEQ ID NO: 383 - DNA, 16 bp, synthetic construct
  source 1..16: mol_type = other DNA
taactaggaggtaatc

SEQ ID NO: 384 - DNA, 16 bp, synthetic construct
  source 1..16: mol_type = other DNA
cgttacctcctagtaa

SEQ ID NO: 385 - DNA, 16 bp, synthetic construct
  source 1..16: mol_type = other DNA
gtccgtctataatcat

SEQ ID NO: 386 - DNA, 16 bp, synthetic construct
  source 1..16: mol_type = other DNA
tatgagtcgggaatca

SEQ ID NO: 387 - DNA, 16 bp, synthetic construct
  source 1..16: mol_type = other DNA
gtatgagtcgggaatc

SEQ ID NO: 388 - DNA, 16 bp, synthetic construct
  source 1..16: mol_type = other DNA
tgtatgagtcgggaat

SEQ ID NO: 389 - DNA, 16 bp, synthetic construct
  source 1..16: mol_type = other DNA
aatctgtatgagtcgg

SEQ ID NO: 390 - DNA, 16 bp, synthetic construct
  source 1..16: mol_type = other DNA
tgctaggtgagtatca

SEQ ID NO: 391 - DNA, 16 bp, synthetic construct
  source 1..16: mol_type = other DNA
ctgctaggtgagtatc

SEQ ID NO: 392 - DNA, 16 bp, synthetic construct
  source 1..16: mol_type = other DNA
ggtcccaggtaagtta

SEQ ID NO: 393 - DNA, 16 bp, synthetic construct
  source 1..16: mol_type = other DNA
ggttcctgtagttgat

SEQ ID NO: 394 - DNA, 16 bp, synthetic construct
  source 1..16: mol_type = other DNA
gactggaatatagccg

SEQ ID NO: 395 - DNA, 16 bp, synthetic construct
  source 1..16: mol_type = other DNA
tgctatttggactgtc

SEQ ID NO: 396 - DNA, 16 bp, synthetic construct
  source 1..16: mol_type = other DNA
accctattgtcatggt

SEQ ID NO: 397 - DNA, 16 bp, synthetic construct
  source 1..16: mol_type = other DNA
taccctattgtcatgg

SEQ ID NO: 398 - DNA, 16 bp, synthetic construct
  source 1..16: mol_type = other DNA
catgataagagggtcc

SEQ ID NO: 399 - DNA, 16 bp, synthetic construct
  source 1..16: mol_type = other DNA
ccatgataagagggtc

SEQ ID NO: 400 - DNA, 16 bp, synthetic construct
  source 1..16: mol_type = other DNA
gtactggaatgagtct

SEQ ID NO: 401 - DNA, 16 bp, synthetic construct
  source 1..16: mol_type = other DNA
cgttctgattggtgtt

SEQ ID NO: 402 - DNA, 16 bp, synthetic construct
  source 1..16: mol_type = other DNA
caatagccgttctgat

SEQ ID NO: 403 - DNA, 16 bp, synthetic construct
  source 1..16: mol_type = other DNA
tcaatagccgttctga

SEQ ID NO: 404 - DNA, 16 bp, synthetic construct
  source 1..16: mol_type = other DNA
atcaatagccgttctg

SEQ ID NO: 405 - DNA, 16 bp, synthetic construct
  source 1..16: mol_type = other DNA
tatcaatagccgttct

SEQ ID NO: 406 - DNA, 16 bp, synthetic construct
  source 1..16: mol_type = other DNA
atatcaatagccgttc

SEQ ID NO: 407 - DNA, 16 bp, synthetic construct
  source 1..16: mol_type = other DNA
catatcaatagccgtt

SEQ ID NO: 408 - DNA, 16 bp, synthetic construct
  source 1..16: mol_type = other DNA
ccatatcaatagccgt

SEQ ID NO: 409 - DNA, 16 bp, synthetic construct
  source 1..16: mol_type = other DNA
accatatcaatagccg

SEQ ID NO: 410 - DNA, 16 bp, synthetic construct
  source 1..16: mol_type = other DNA
cttgaggtattagacc

SEQ ID NO: 411 - DNA, 16 bp, synthetic construct
  source 1..16: mol_type = other DNA
accgaaccactccatc

SEQ ID NO: 412 - DNA, 16 bp, synthetic construct
  source 1..16: mol_type = other DNA
aaccgaaccactccat

SEQ ID NO: 413 - DNA, 16 bp, synthetic construct
  source 1..16: mol_type = other DNA
caaccgaaccactcca

SEQ ID NO: 414 - DNA, 16 bp, synthetic construct
  source 1..16: mol_type = other DNA
gcaaccgaaccactcc

SEQ ID NO: 415 - DNA, 16 bp, synthetic construct
  source 1..16: mol_type = other DNA
tgcaaccgaaccactc

SEQ ID NO: 416 - DNA, 16 bp, synthetic construct
  source 1..16: mol_type = other DNA
tatcttgcggtgtgtg

SEQ ID NO: 417 - DNA, 16 bp, synthetic construct
  source 1..16: mol_type = other DNA
gtatcttgcggtgtgt

SEQ ID NO: 418 - DNA, 16 bp, synthetic construct
  source 1..16: mol_type = other DNA
tgtatcttgcggtgtg

SEQ ID NO: 419 - DNA, 16 bp, synthetic construct
  source 1..16: mol_type = other DNA
gtgctccaatgatatc

SEQ ID NO: 420 - DNA, 16 bp, synthetic construct
  source 1..16: mol_type = other DNA
ttgcggtcacacattt

SEQ ID NO: 421 - DNA, 16 bp, synthetic construct
  source 1..16: mol_type = other DNA
attgcggtcacacatt

SEQ ID NO: 422 - DNA, 16 bp, synthetic construct
  source 1..16: mol_type = other DNA
tattgcggtcacacat

SEQ ID NO: 423 - DNA, 16 bp, synthetic construct
  source 1..16: mol_type = other DNA
ctattgcggtcacaca

SEQ ID NO: 424 - DNA, 16 bp, synthetic construct
  source 1..16: mol_type = other DNA
accttatagcacatgc

SEQ ID NO: 425 - DNA, 16 bp, synthetic construct
  source 1..16: mol_type = other DNA
tatcacactacttcga

SEQ ID NO: 426 - DNA, 16 bp, synthetic construct
  source 1..16: mol_type = other DNA
taataaagcacggtct

SEQ ID NO: 427 - DNA, 16 bp, synthetic construct
  source 1..16: mol_type = other DNA
ttaataaagcacggtc

SEQ ID NO: 428 - DNA, 16 bp, synthetic construct
  source 1..16: mol_type = other DNA
cattaataaagcacgg

SEQ ID NO: 429 - DNA, 16 bp, synthetic construct
  source 1..16: mol_type = other DNA
ggttcatacgcattta

SEQ ID NO: 430 - DNA, 16 bp, synthetic construct
  source 1..16: mol_type = other DNA
aggttcatacgcattt

SEQ ID NO: 431 - DNA, 16 bp, synthetic construct
  source 1..16: mol_type = other DNA
taggttcatacgcatt

SEQ ID NO: 432 - DNA, 16 bp, synthetic construct
  source 1..16: mol_type = other DNA
ttaggttcatacgcat

SEQ ID NO: 433 - DNA, 16 bp, synthetic construct
  source 1..16: mol_type = other DNA
gttaggttcatacgca

SEQ ID NO: 434 - DNA, 16 bp, synthetic construct
  source 1..16: mol_type = other DNA
tgttaggttcatacgc

SEQ ID NO: 435 - DNA, 16 bp, synthetic construct
  source 1..16: mol_type = other DNA
ttgttaggttcatacg

SEQ ID NO: 436 - DNA, 16 bp, synthetic construct
  source 1..16: mol_type = other DNA
ggcaatcttggtgtac

SEQ ID NO: 437 - DNA, 16 bp, synthetic construct
  source 1..16: mol_type = other DNA
tggcaatcttggtgta

SEQ ID NO: 438 - DNA, 16 bp, synthetic construct
  source 1..16: mol_type = other DNA
tcagtacgatcagaga

SEQ ID NO: 439 - DNA, 16 bp, synthetic construct
  source 1..16: mol_type = other DNA
ttcagtacgatcagag

SEQ ID NO: 440 - DNA, 16 bp, synthetic construct
  source 1..16: mol_type = other DNA
tttcagtacgatcaga

SEQ ID NO: 441 - DNA, 16 bp, synthetic construct
  source 1..16: mol_type = other DNA
atttcagtacgatcag

SEQ ID NO: 442 - DNA, 16 bp, synthetic construct
  source 1..16: mol_type = other DNA
caatttcagtacgatc

SEQ ID NO: 443 - DNA, 16 bp, synthetic construct
  source 1..16: mol_type = other DNA
gatcaatttcagtacg

SEQ ID NO: 444 - DNA, 17 bp, synthetic construct
  source 1..17: mol_type = other DNA
aagaaactcacaatgcc

SEQ ID NO: 445 - DNA, 17 bp, synthetic construct
  source 1..17: mol_type = other DNA
gaagaaactcacaatgc

SEQ ID NO: 446 - DNA, 17 bp, synthetic construct
  source 1..17: mol_type = other DNA
tgcgtggagaccagatg

SEQ ID NO: 447 - DNA, 17 bp, synthetic construct
  source 1..17: mol_type = other DNA
ccatatgcaaactatag

SEQ ID NO: 448 - DNA, 17 bp, synthetic construct
  source 1..17: mol_type = other DNA
caccatatgcaaactat

SEQ ID NO: 449 - DNA, 17 bp, synthetic construct
  source 1..17: mol_type = other DNA
aaacactgttctatccc

SEQ ID NO: 450 - DNA, 17 bp, synthetic construct
  source 1..17: mol_type = other DNA
taaacactgttctatcc

SEQ ID NO: 451 - DNA, 17 bp, synthetic construct
  source 1..17: mol_type = other DNA
gtaaacactgttctatc

SEQ ID NO: 452 - DNA, 17 bp, synthetic construct
  source 1..17: mol_type = other DNA
caagtaaacactgttct

SEQ ID NO: 453 - DNA, 17 bp, synthetic construct
  source 1..17: mol_type = other DNA
ccaagtaaacactgttc

SEQ ID NO: 454 - DNA, 17 bp, synthetic construct
  source 1..17: mol_type = other DNA
gccaagtaaacactgtt

SEQ ID NO: 455 - DNA, 17 bp, synthetic construct
  source 1..17: mol_type = other DNA
agccaagtaaacactgt

SEQ ID NO: 456 - DNA, 17 bp, synthetic construct
  source 1..17: mol_type = other DNA
cagccaagtaaacactg

SEQ ID NO: 457 - DNA, 17 bp, synthetic construct
  source 1..17: mol_type = other DNA
acagccaagtaaacact

SEQ ID NO: 458 - DNA, 17 bp, synthetic construct
  source 1..17: mol_type = other DNA
cacagccaagtaaacac

SEQ ID NO: 459 - DNA, 17 bp, synthetic construct
  source 1..17: mol_type = other DNA
gcataaagctacacagc

SEQ ID NO: 460 - DNA, 17 bp, synthetic construct
  source 1..17: mol_type = other DNA
ttgggacacaaggcata

SEQ ID NO: 461 - DNA, 17 bp, synthetic construct
  source 1..17: mol_type = other DNA
gccaatttaaccatcca

SEQ ID NO: 462 - DNA, 17 bp, synthetic construct
  source 1..17: mol_type = other DNA
atgccaatttaaccatc

SEQ ID NO: 463 - DNA, 17 bp, synthetic construct
  source 1..17: mol_type = other DNA
gatgccaatttaaccat

SEQ ID NO: 464 - DNA, 17 bp, synthetic construct
  source 1..17: mol_type = other DNA
cgatgccaatttaacca

SEQ ID NO: 465 - DNA, 17 bp, synthetic construct
  source 1..17: mol_type = other DNA
tcgatgccaatttaacc

SEQ ID NO: 466 - DNA, 17 bp, synthetic construct
  source 1..17: mol_type = other DNA
agtcgatgccaatttaa

SEQ ID NO: 467 - DNA, 17 bp, synthetic construct
  source 1..17: mol_type = other DNA
aagtcgatgccaattta

SEQ ID NO: 468 - DNA, 17 bp, synthetic construct
  source 1..17: mol_type = other DNA
aaagtcgatgccaattt

SEQ ID NO: 469 - DNA, 17 bp, synthetic construct
  source 1..17: mol_type = other DNA
taaagtcgatgccaatt

SEQ ID NO: 470 - DNA, 17 bp, synthetic construct
  source 1..17: mol_type = other DNA
ttaaagtcgatgccaat

SEQ ID NO: 471 - DNA, 17 bp, synthetic construct
  source 1..17: mol_type = other DNA
gttaaagtcgatgccaa

SEQ ID NO: 472 - DNA, 17 bp, synthetic construct
  source 1..17: mol_type = other DNA
ccttgatgatctgttag

SEQ ID NO: 473 - DNA, 17 bp, synthetic construct
  source 1..17: mol_type = other DNA
gccttgatgatctgtta

SEQ ID NO: 474 - DNA, 17 bp, synthetic construct
  source 1..17: mol_type = other DNA
agccttgatgatctgtt

SEQ ID NO: 475 - DNA, 17 bp, synthetic construct
  source 1..17: mol_type = other DNA
aagtcagccttgatgat

SEQ ID NO: 476 - DNA, 17 bp, synthetic construct
  source 1..17: mol_type = other DNA
aaagtcagccttgatga

SEQ ID NO: 477 - DNA, 17 bp, synthetic construct
  source 1..17: mol_type = other DNA
gaaagtcagccttgatg

SEQ ID NO: 478 - DNA, 17 bp, synthetic construct
  source 1..17: mol_type = other DNA
agaaagtcagccttgat

SEQ ID NO: 479 - DNA, 17 bp, synthetic construct
  source 1..17: mol_type = other DNA
gagaaagtcagccttga

SEQ ID NO: 480 - DNA, 17 bp, synthetic construct
  source 1..17: mol_type = other DNA
agagaaagtcagccttg

SEQ ID NO: 481 - DNA, 17 bp, synthetic construct
  source 1..17: mol_type = other DNA
caagagaaagtcagcct

SEQ ID NO: 482 - DNA, 17 bp, synthetic construct
  source 1..17: mol_type = other DNA
ccaagagaaagtcagcc

SEQ ID NO: 483 - DNA, 17 bp, synthetic construct
  source 1..17: mol_type = other DNA
cccaagagaaagtcagc

SEQ ID NO: 484 - DNA, 17 bp, synthetic construct
  source 1..17: mol_type = other DNA
ctgcaagtgagagatgc

SEQ ID NO: 485 - DNA, 17 bp, synthetic construct
  source 1..17: mol_type = other DNA
tctgcaagtgagagatg

SEQ ID NO: 486 - DNA, 17 bp, synthetic construct
  source 1..17: mol_type = other DNA
gtgttctctgcaagtga

SEQ ID NO: 487 - DNA, 17 bp, synthetic construct
  source 1..17: mol_type = other DNA
tgtgttctctgcaagtg

SEQ ID NO: 488 - DNA, 17 bp, synthetic construct
  source 1..17: mol_type = other DNA
atgtgttctctgcaagt

SEQ ID NO: 489 - DNA, 17 bp, synthetic construct
  source 1..17: mol_type = other DNA
acattgctattagagtc

SEQ ID NO: 490 - DNA, 17 bp, synthetic construct
  source 1..17: mol_type = other DNA
gacattgctattagagt

SEQ ID NO: 491 - DNA, 17 bp, synthetic construct
  source 1..17: mol_type = other DNA
tgacattgctattagag

SEQ ID NO: 492 - DNA, 17 bp, synthetic construct
  source 1..17: mol_type = other DNA
gtgacattgctattaga

SEQ ID NO: 493 - DNA, 17 bp, synthetic construct
  source 1..17: mol_type = other DNA
tgtgacattgctattag

SEQ ID NO: 494 - DNA, 17 bp, synthetic construct
  source 1..17: mol_type = other DNA
gtaaatactccaggttt

SEQ ID NO: 495 - DNA, 17 bp, synthetic construct
  source 1..17: mol_type = other DNA
tgtaaatactccaggtt

SEQ ID NO: 496 - DNA, 17 bp, synthetic construct
  source 1..17: mol_type = other DNA
atgtaaatactccaggt

SEQ ID NO: 497 - DNA, 17 bp, synthetic construct
  source 1..17: mol_type = other DNA
aatgtaaatactccagg

SEQ ID NO: 498 - DNA, 17 bp, synthetic construct
  source 1..17: mol_type = other DNA
tcagtggcagatattac

SEQ ID NO: 499 - DNA, 17 bp, synthetic construct
  source 1..17: mol_type = other DNA
ttcagtggcagatatta

SEQ ID NO: 500 - DNA, 17 bp, synthetic construct
  source 1..17: mol_type = other DNA
gttcagtggcagatatt

SEQ ID NO: 501 - DNA, 17 bp, synthetic construct
  source 1..17: mol_type = other DNA
agttcagtggcagatat

SEQ ID NO: 502 - DNA, 17 bp, synthetic construct
  source 1..17: mol_type = other DNA
cagttcagtggcagata

SEQ ID NO: 503 - DNA, 17 bp, synthetic construct
  source 1..17: mol_type = other DNA
gcagttcagtggcagat

SEQ ID NO: 504 - DNA, 17 bp, synthetic construct
  source 1..17: mol_type = other DNA
atttgcagttcagtggc

SEQ ID NO: 505 - DNA, 17 bp, synthetic construct
  source 1..17: mol_type = other DNA
aatttgcagttcagtgg

SEQ ID NO: 506 - DNA, 17 bp, synthetic construct
  source 1..17: mol_type = other DNA
caatttgcagttcagtg

SEQ ID NO: 507 - DNA, 17 bp, synthetic construct
  source 1..17: mol_type = other DNA
acaatttgcagttcagt

SEQ ID NO: 508 - DNA, 17 bp, synthetic construct
  source 1..17: mol_type = other DNA
aacaatttgcagttcag

SEQ ID NO: 509 - DNA, 17 bp, synthetic construct
  source 1..17: mol_type = other DNA
ggtgaggttccgataaa

SEQ ID NO: 510 - DNA, 17 bp, synthetic construct
  source 1..17: mol_type = other DNA
cccaagtttgcctgtga

SEQ ID NO: 511 - DNA, 17 bp, synthetic construct
  source 1..17: mol_type = other DNA
actaacactgccatccc

SEQ ID NO: 512 - DNA, 17 bp, synthetic construct
  source 1..17: mol_type = other DNA
tactaacactgccatcc

SEQ ID NO: 513 - DNA, 17 bp, synthetic construct
  source 1..17: mol_type = other DNA
atactaacactgccatc

SEQ ID NO: 514 - DNA, 17 bp, synthetic construct
  source 1..17: mol_type = other DNA
aatactaacactgccat

SEQ ID NO: 515 - DNA, 17 bp, synthetic construct
  source 1..17: mol_type = other DNA
gaatactaacactgcca

SEQ ID NO: 516 - DNA, 17 bp, synthetic construct
  source 1..17: mol_type = other DNA
agaatactaacactgcc

SEQ ID NO: 517 - DNA, 17 bp, synthetic construct
  source 1..17: mol_type = other DNA
gaaacttgaattggttc

SEQ ID NO: 518 - DNA, 17 bp, synthetic construct
  source 1..17: mol_type = other DNA
ggaaacttgaattggtt

SEQ ID NO: 519 - DNA, 17 bp, synthetic construct
  source 1..17: mol_type = other DNA
gggaaacttgaattggt

SEQ ID NO: 520 - DNA, 17 bp, synthetic construct
  source 1..17: mol_type = other DNA
tacaaagattgggcatg

SEQ ID NO: 521 - DNA, 17 bp, synthetic construct
  source 1..17: mol_type = other DNA
ttacaaagattgggcat

SEQ ID NO: 522 - DNA, 17 bp, synthetic construct
  source 1..17: mol_type = other DNA
cttacaaagattgggca

SEQ ID NO: 523 - DNA, 17 bp, synthetic construct
  source 1..17: mol_type = other DNA
tcttacaaagattgggc

SEQ ID NO: 524 - DNA, 17 bp, synthetic construct
  source 1..17: mol_type = other DNA
ctcttacaaagattggg

SEQ ID NO: 525 - DNA, 17 bp, synthetic construct
  source 1..17: mol_type = other DNA
actcttacaaagattgg

SEQ ID NO: 526 - DNA, 17 bp, synthetic construct
  source 1..17: mol_type = other DNA
atggaaatgactgtgta

SEQ ID NO: 527 - DNA, 17 bp, synthetic construct
  source 1..17: mol_type = other DNA
ctatggaaatgactgtg

SEQ ID NO: 528 - DNA, 17 bp, synthetic construct
  source 1..17: mol_type = other DNA
accgaaccactccatct

SEQ ID NO: 529 - DNA, 17 bp, synthetic construct
  source 1..17: mol_type = other DNA
aaccgaaccactccatc

SEQ ID NO: 530 - DNA, 17 bp, synthetic construct
  source 1..17: mol_type = other DNA
caaccgaaccactccat

SEQ ID NO: 531 - DNA, 17 bp, synthetic construct
  source 1..17: mol_type = other DNA
gcaaccgaaccactcca

SEQ ID NO: 532 - DNA, 17 bp, synthetic construct
  source 1..17: mol_type = other DNA
tgcaaccgaaccactcc

SEQ ID NO: 533 - DNA, 17 bp, synthetic construct
  source 1..17: mol_type = other DNA
ctgcaaccgaaccactc

SEQ ID NO: 534 - DNA, 17 bp, synthetic construct
  source 1..17: mol_type = other DNA
cctgcaaccgaaccact

SEQ ID NO: 535 - DNA, 17 bp, synthetic construct
  source 1..17: mol_type = other DNA
ccctgcaaccgaaccac

SEQ ID NO: 536 - DNA, 17 bp, synthetic construct
  source 1..17: mol_type = other DNA
cattgtctgctccagga

SEQ ID NO: 537 - DNA, 17 bp, synthetic construct
  source 1..17: mol_type = other DNA
ccattgtctgctccagg

SEQ ID NO: 538 - DNA, 17 bp, synthetic construct
  source 1..17: mol_type = other DNA
gtaatcccattgtctgc

SEQ ID NO: 539 - DNA, 17 bp, synthetic construct
  source 1..17: mol_type = other DNA
agtaatcccattgtctg

SEQ ID NO: 540 - DNA, 17 bp, synthetic construct
  source 1..17: mol_type = other DNA
cagtaatcccattgtct

SEQ ID NO: 541 - DNA, 17 bp, synthetic construct
  source 1..17: mol_type = other DNA
ccagtaatcccattgtc

SEQ ID NO: 542 - DNA, 18 bp, synthetic construct
  source 1..18: mol_type = other DNA
tcagcctttactccaaag

SEQ ID NO: 543 - DNA, 18 bp, synthetic construct
  source 1..18: mol_type = other DNA
atcagcctttactccaaa

SEQ ID NO: 544 - DNA, 18 bp, synthetic construct
  source 1..18: mol_type = other DNA
gatcagcctttactccaa

SEQ ID NO: 545 - DNA, 18 bp, synthetic construct
  source 1..18: mol_type = other DNA
gggcactctcacattggg

SEQ ID NO: 546 - DNA, 18 bp, synthetic construct
  source 1..18: mol_type = other DNA
agggcactctcacattgg

SEQ ID NO: 547 - DNA, 18 bp, synthetic construct
  source 1..18: mol_type = other DNA
ctgcaagtgagagatgcc

SEQ ID NO: 548 - DNA, 18 bp, synthetic construct
  source 1..18: mol_type = other DNA
tctgcaagtgagagatgc

SEQ ID NO: 549 - DNA, 18 bp, synthetic construct
  source 1..18: mol_type = other DNA
tgtgttctctgcaagtga

SEQ ID NO: 550 - DNA, 18 bp, synthetic construct
  source 1..18: mol_type = other DNA
atgtgttctctgcaagtg

SEQ ID NO: 551 - DNA, 18 bp, synthetic construct
  source 1..18: mol_type = other DNA
tatgtgttctctgcaagt

SEQ ID NO: 552 - DNA, 18 bp, synthetic construct
  source 1..18: mol_type = other DNA
gtatgtgttctctgcaag

SEQ ID NO: 553 - DNA, 18 bp, synthetic construct
  source 1..18: mol_type = other DNA
tgtatgtgttctctgcaa

SEQ ID NO: 554 - DNA, 18 bp, synthetic construct
  source 1..18: mol_type = other DNA
atgtatgtgttctctgca

SEQ ID NO: 555 - DNA, 18 bp, synthetic construct
  source 1..18: mol_type = other DNA
aatgtatgtgttctctgc

SEQ ID NO: 556 - DNA, 18 bp, synthetic construct
  source 1..18: mol_type = other DNA
gcgatcttcaaagggacc

SEQ ID NO: 557 - DNA, 18 bp, synthetic construct
  source 1..18: mol_type = other DNA
tctagtgaggcgatcttc

SEQ ID NO: 558 - DNA, 18 bp, synthetic construct
  source 1..18: mol_type = other DNA
tcagccagatgaaagatt

SEQ ID NO: 559 - DNA, 18 bp, synthetic construct
  source 1..18: mol_type = other DNA
atccttcagccagatgaa

SEQ ID NO: 560 - DNA, 18 bp, synthetic construct
  source 1..18: mol_type = other DNA
agtccaagtctcttagat

SEQ ID NO: 561 - DNA, 18 bp, synthetic construct
  source 1..18: mol_type = other DNA
tagtccaagtctcttaga

SEQ ID NO: 562 - DNA, 18 bp, synthetic construct
  source 1..18: mol_type = other DNA
ctagtccaagtctcttag

SEQ ID NO: 563 - DNA, 18 bp, synthetic construct
  source 1..18: mol_type = other DNA
tgatcctgagaaactagt

SEQ ID NO: 564 - DNA, 18 bp, synthetic construct
  source 1..18: mol_type = other DNA
atgatcctgagaaactag

SEQ ID NO: 565 - DNA, 18 bp, synthetic construct
  source 1..18: mol_type = other DNA
tgcccaaatctatatgct

SEQ ID NO: 566 - DNA, 18 bp, synthetic construct
  source 1..18: mol_type = other DNA
gtgcccaaatctatatgc

SEQ ID NO: 567 - DNA, 18 bp, synthetic construct
  source 1..18: mol_type = other DNA
agtgcccaaatctatatg

SEQ ID NO: 568 - DNA, 18 bp, synthetic construct
  source 1..18: mol_type = other DNA
gagtgcccaaatctatat

SEQ ID NO: 569 - DNA, 18 bp, synthetic construct
  source 1..18: mol_type = other DNA
agagtgcccaaatctata

SEQ ID NO: 570 - DNA, 18 bp, synthetic construct
  source 1..18: mol_type = other DNA
cagagtgcccaaatctat

SEQ ID NO: 571 - DNA, 18 bp, synthetic construct
  source 1..18: mol_type = other DNA
acagagtgcccaaatcta

SEQ ID NO: 572 - DNA, 18 bp, synthetic construct
  source 1..18: mol_type = other DNA
gacagagtgcccaaatct

SEQ ID NO: 573 - DNA, 18 bp, synthetic construct
  source 1..18: mol_type = other DNA
cttaatcacaagcacaca

SEQ ID NO: 574 - DNA, 18 bp, synthetic construct
  source 1..18: mol_type = other DNA
acttaatcacaagcacac

SEQ ID NO: 575 - DNA, 18 bp, synthetic construct
  source 1..18: mol_type = other DNA
gaacttaatcacaagcac

SEQ ID NO: 576 - DNA, 18 bp, synthetic construct
  source 1..18: mol_type = other DNA
cagaacttaatcacaagc

SEQ ID NO: 577 - DNA, 18 bp, synthetic construct
  source 1..18: mol_type = other DNA
ggtcagaacttaatcaca

SEQ ID NO: 578 - DNA, 18 bp, synthetic construct
  source 1..18: mol_type = other DNA
tggtcagaacttaatcac

SEQ ID NO: 579 - DNA, 18 bp, synthetic construct
  source 1..18: mol_type = other DNA
cttggtcagaacttaatc

SEQ ID NO: 580 - DNA, 18 bp, synthetic construct
  source 1..18: mol_type = other DNA
ccttggtcagaacttaat

SEQ ID NO: 581 - DNA, 18 bp, synthetic construct
  source 1..18: mol_type = other DNA
gcttccaagttcatcagc

SEQ ID NO: 582 - DNA, 18 bp, synthetic construct
  source 1..18: mol_type = other DNA
ggcttccaagttcatcag

SEQ ID NO: 583 - DNA, 18 bp, synthetic construct
  source 1..18: mol_type = other DNA
aggcttccaagttcatca

SEQ ID NO: 584 - DNA, 18 bp, synthetic construct
  source 1..18: mol_type = other DNA
aaggcttccaagttcatc

SEQ ID NO: 585 - DNA, 18 bp, synthetic construct
  source 1..18: mol_type = other DNA
aaaggcttccaagttcat

SEQ ID NO: 586 - DNA, 18 bp, synthetic construct
  source 1..18: mol_type = other DNA
caaaggcttccaagttca

SEQ ID NO: 587 - DNA, 18 bp, synthetic construct
  source 1..18: mol_type = other DNA
tcaaaggcttccaagttc

SEQ ID NO: 588 - DNA, 18 bp, synthetic construct
  source 1..18: mol_type = other DNA
ttcaaaggcttccaagtt

SEQ ID NO: 589 - DNA, 18 bp, synthetic construct
  source 1..18: mol_type = other DNA
gcacatagcttcaaaggc

SEQ ID NO: 590 - DNA, 18 bp, synthetic construct
  source 1..18: mol_type = other DNA
ggcacatagcttcaaagg

SEQ ID NO: 591 - DNA, 18 bp, synthetic construct
  source 1..18: mol_type = other DNA
acatattgattctgggcc

SEQ ID NO: 592 - DNA, 18 bp, synthetic construct
  source 1..18: mol_type = other DNA
cacatattgattctgggc

SEQ ID NO: 593 - DNA, 18 bp, synthetic construct
  source 1..18: mol_type = other DNA
tccacatattgattctgg

SEQ ID NO: 594 - DNA, 18 bp, synthetic construct
  source 1..18: mol_type = other DNA
aattaatgacaggctccc

SEQ ID NO: 595 - DNA, 18 bp, synthetic construct
  source 1..18: mol_type = other DNA
taattaatgacaggctcc

SEQ ID NO: 596 - DNA, 18 bp, synthetic construct
  source 1..18: mol_type = other DNA
ctaattaatgacaggctc

SEQ ID NO: 597 - DNA, 18 bp, synthetic construct
  source 1..18: mol_type = other DNA
cctaattaatgacaggct

SEQ ID NO: 598 - DNA, 18 bp, synthetic construct
  source 1..18: mol_type = other DNA
tgcctaattaatgacagg

SEQ ID NO: 599 - DNA, 18 bp, synthetic construct
  source 1..18: mol_type = other DNA
gacagttcttacattagc

SEQ ID NO: 600 - DNA, 18 bp, synthetic construct
  source 1..18: mol_type = other DNA
cgtctaaagcagccttgc

SEQ ID NO: 601 - DNA, 18 bp, synthetic construct
  source 1..18: mol_type = other DNA
ccgtctaaagcagccttg

SEQ ID NO: 602 - DNA, 18 bp, synthetic construct
  source 1..18: mol_type = other DNA
tccgtctaaagcagcctt

SEQ ID NO: 603 - DNA, 18 bp, synthetic construct
  source 1..18: mol_type = other DNA
ttccgtctaaagcagcct

SEQ ID NO: 604 - DNA, 18 bp, synthetic construct
  source 1..18: mol_type = other DNA
attccgtctaaagcagcc

SEQ ID NO: 605 - DNA, 18 bp, synthetic construct
  source 1..18: mol_type = other DNA
aattccgtctaaagcagc

SEQ ID NO: 606 - DNA, 18 bp, synthetic construct
  source 1..18: mol_type = other DNA
gtattgggagtatgtggt

SEQ ID NO: 607 - DNA, 18 bp, synthetic construct
  source 1..18: mol_type = other DNA
tgtattgggagtatgtgg

SEQ ID NO: 608 - DNA, 18 bp, synthetic construct
  source 1..18: mol_type = other DNA
gtgtattgggagtatgtg

SEQ ID NO: 609 - DNA, 18 bp, synthetic construct
  source 1..18: mol_type = other DNA
agtgtattgggagtatgt

SEQ ID NO: 610 - DNA, 18 bp, synthetic construct
  source 1..18: mol_type = other DNA
ctgtgaaagtgtattggg

SEQ ID NO: 611 - DNA, 18 bp, synthetic construct
  source 1..18: mol_type = other DNA
tctgtgaaagtgtattgg

SEQ ID NO: 612 - DNA, 18 bp, synthetic construct
  source 1..18: mol_type = other DNA
atggtgaaatgggtattc

SEQ ID NO: 613 - DNA, 18 bp, synthetic construct
  source 1..18: mol_type = other DNA
catggtgaaatgggtatt

SEQ ID NO: 614 - DNA, 18 bp, synthetic construct
  source 1..18: mol_type = other DNA
tgttaatgaaggcatggt

SEQ ID NO: 615 - DNA, 18 bp, synthetic construct
  source 1..18: mol_type = other DNA
ggaaaccctattctttga

SEQ ID NO: 616 - DNA, 18 bp, synthetic construct
  source 1..18: mol_type = other DNA
gcatgacaactatttcca

SEQ ID NO: 617 - DNA, 18 bp, synthetic construct
  source 1..18: mol_type = other DNA
agcatgacaactatttcc

SEQ ID NO: 618 - DNA, 18 bp, synthetic construct
  source 1..18: mol_type = other DNA
agtttgcctgtgaaattc

SEQ ID NO: 619 - DNA, 18 bp, synthetic construct
  source 1..18: mol_type = other DNA
caagtttgcctgtgaaat

SEQ ID NO: 620 - DNA, 18 bp, synthetic construct
  source 1..18: mol_type = other DNA
ccaagtttgcctgtgaaa

SEQ ID NO: 621 - DNA, 18 bp, synthetic construct
  source 1..18: mol_type = other DNA
cttccaaagacttcgtat

SEQ ID NO: 622 - DNA, 18 bp, synthetic construct
  source 1..18: mol_type = other DNA
acttccaaagacttcgta

SEQ ID NO: 623 - DNA, 18 bp, synthetic construct
  source 1..18: mol_type = other DNA
atccagccaaacactccc

SEQ ID NO: 624 - DNA, 18 bp, synthetic construct
  source 1..18: mol_type = other DNA
catccagccaaacactcc

SEQ ID NO: 625 - DNA, 18 bp, synthetic construct
  source 1..18: mol_type = other DNA
acatccagccaaacactc

SEQ ID NO: 626 - DNA, 18 bp, synthetic construct
  source 1..18: mol_type = other DNA
aacatccagccaaacact

SEQ ID NO: 627 - DNA, 19 bp, synthetic construct
  source 1..19: mol_type = other DNA
cacattcatagagcccaca

SEQ ID NO: 628 - DNA, 19 bp, synthetic construct
  source 1..19: mol_type = other DNA
gcacattcatagagcccac

SEQ ID NO: 629 - DNA, 19 bp, synthetic construct
  source 1..19: mol_type = other DNA
agcacattcatagagccca

SEQ ID NO: 630 - DNA, 19 bp, synthetic construct
  source 1..19: mol_type = other DNA
caactaaagcacccatata

SEQ ID NO: 631 - DNA, 19 bp, synthetic construct
  source 1..19: mol_type = other DNA
tcaactaaagcacccatat

SEQ ID NO: 632 - DNA, 19 bp, synthetic construct
  source 1..19: mol_type = other DNA
atcaactaaagcacccata

SEQ ID NO: 633 - DNA, 19 bp, synthetic construct
  source 1..19: mol_type = other DNA
acttccacaagataaccct

SEQ ID NO: 634 - DNA, 19 bp, synthetic construct
  source 1..19: mol_type = other DNA
cacttccacaagataaccc

SEQ ID NO: 635 - DNA, 19 bp, synthetic construct
  source 1..19: mol_type = other DNA
ccacttccacaagataacc

SEQ ID NO: 636 - DNA, 19 bp, synthetic construct
  source 1..19: mol_type = other DNA
cccacttccacaagataac

SEQ ID NO: 637 - DNA, 19 bp, synthetic construct
  source 1..19: mol_type = other DNA
tcccacttccacaagataa

SEQ ID NO: 638 - DNA, 19 bp, synthetic construct
  source 1..19: mol_type = other DNA
atcccacttccacaagata

SEQ ID NO: 639 - DNA, 19 bp, synthetic construct
  source 1..19: mol_type = other DNA
catcccacttccacaagat

SEQ ID NO: 640 - DNA, 19 bp, synthetic construct
  source 1..19: mol_type = other DNA
agaataagctctcaactgt

SEQ ID NO: 641 - DNA, 19 bp, synthetic construct
  source 1..19: mol_type = other DNA
gttacaggagaataagctc

SEQ ID NO: 642 - DNA, 19 bp, synthetic construct
  source 1..19: mol_type = other DNA
ttcaaggatggttacagga

SEQ ID NO: 643 - DNA, 19 bp, synthetic construct
  source 1..19: mol_type = other DNA
attcaaggatggttacagg

SEQ ID NO: 644 - DNA, 19 bp, synthetic construct
  source 1..19: mol_type = other DNA
tctccactcaccatgaaca

SEQ ID NO: 645 - DNA, 19 bp, synthetic construct
  source 1..19: mol_type = other DNA
actctccactcaccatgaa

SEQ ID NO: 646 - DNA, 19 bp, synthetic construct
  source 1..19: mol_type = other DNA
aactctccactcaccatga

SEQ ID NO: 647 - DNA, 19 bp, synthetic construct
  source 1..19: mol_type = other DNA
aaactctccactcaccatg

SEQ ID NO: 648 - DNA, 19 bp, synthetic construct
  source 1..19: mol_type = other DNA
acatacatttcacccgaag

SEQ ID NO: 649 - DNA, 19 bp, synthetic construct
  source 1..19: mol_type = other DNA
tacatacatttcacccgaa

SEQ ID NO: 650 - DNA, 19 bp, synthetic construct
  source 1..19: mol_type = other DNA
ctacatacatttcacccga

SEQ ID NO: 651 - DNA, 19 bp, synthetic construct
  source 1..19: mol_type = other DNA
gagcccatcacagcgaaag

SEQ ID NO: 652 - DNA, 19 bp, synthetic construct
  source 1..19: mol_type = other DNA
atcatataagaactaccgg

SEQ ID NO: 653 - DNA, 19 bp, synthetic construct
  source 1..19: mol_type = other DNA
ccgtaagacagctcttcct

SEQ ID NO: 654 - DNA, 19 bp, synthetic construct
  source 1..19: mol_type = other DNA
tccgtaagacagctcttcc

SEQ ID NO: 655 - DNA, 19 bp, synthetic construct
  source 1..19: mol_type = other DNA
ggtcccaggtaagttaatt

SEQ ID NO: 656 - DNA, 19 bp, synthetic construct
  source 1..19: mol_type = other DNA
ttgatctcattcggaagga

SEQ ID NO: 657 - DNA, 19 bp, synthetic construct
  source 1..19: mol_type = other DNA
cttgatctcattcggaagg

SEQ ID NO: 658 - DNA, 19 bp, synthetic construct
  source 1..19: mol_type = other DNA
tgcagcctaagtttattag

SEQ ID NO: 659 - DNA, 19 bp, synthetic construct
  source 1..19: mol_type = other DNA
catatgttaaggatgactg

SEQ ID NO: 660 - DNA, 20 bp, synthetic construct
  source 1..20: mol_type = other DNA
tatcaatcagtgtggagctt

SEQ ID NO: 661 - DNA, 20 bp, synthetic construct
  source 1..20: mol_type = other DNA
gtatcaatcagtgtggagct

SEQ ID NO: 662 - DNA, 20 bp, synthetic construct
  source 1..20: mol_type = other DNA
agtatcaatcagtgtggagc

SEQ ID NO: 663 - DNA, 20 bp, synthetic construct
  source 1..20: mol_type = other DNA
gagtatcaatcagtgtggag

SEQ ID NO: 664 - DNA, 20 bp, synthetic construct
  source 1..20: mol_type = other DNA
agagtatcaatcagtgtgga

SEQ ID NO: 665 - DNA, 20 bp, synthetic construct
  source 1..20: mol_type = other DNA
catcccacttccacaagata

SEQ ID NO: 666 - DNA, 20 bp, synthetic construct
  source 1..20: mol_type = other DNA
tcatcccacttccacaagat

SEQ ID NO: 667 - DNA, 20 bp, synthetic construct
  source 1..20: mol_type = other DNA
cacacccttggtcagaactt

SEQ ID NO: 668 - DNA, 20 bp, synthetic construct
  source 1..20: mol_type = other DNA
acacacccttggtcagaact

SEQ ID NO: 669 - DNA, 20 bp, synthetic construct
  source 1..20: mol_type = other DNA
cacacacccttggtcagaac

SEQ ID NO: 670 - DNA, 20 bp, synthetic construct
  source 1..20: mol_type = other DNA
tcacacacccttggtcagaa

SEQ ID NO: 671 - DNA, 20 bp, synthetic construct
  source 1..20: mol_type = other DNA
gtcacacacccttggtcaga

SEQ ID NO: 672 - DNA, 20 bp, synthetic construct
  source 1..20: mol_type = other DNA
cgtcacacacccttggtcag

SEQ ID NO: 673 - DNA, 20 bp, synthetic construct
  source 1..20: mol_type = other DNA
acgtcacacacccttggtca

SEQ ID NO: 674 - DNA, 20 bp, synthetic construct
  source 1..20: mol_type = other DNA
cacgtcacacacccttggtc

SEQ ID NO: 675 - DNA, 20 bp, synthetic construct
  source 1..20: mol_type = other DNA
ccacgtcacacacccttggt

SEQ ID NO: 676 - DNA, 20 bp, synthetic construct
  source 1..20: mol_type = other DNA
cccacgtcacacacccttgg

SEQ ID NO: 677 - DNA, 20 bp, synthetic construct
  source 1..20: mol_type = other DNA
gcccacgtcacacacccttg

SEQ ID NO: 678 - DNA, 20 bp, synthetic construct
  source 1..20: mol_type = other DNA
atcaagctctgtatcgcaaa

SEQ ID NO: 679 - DNA, 20 bp, synthetic construct
  source 1..20: mol_type = other DNA
catcaagctctgtatcgcaa

SEQ ID NO: 680 - DNA, 20 bp, synthetic construct
  source 1..20: mol_type = other DNA
ccatcaagctctgtatcgca

SEQ ID NO: 681 - DNA, 20 bp, synthetic construct
  source 1..20: mol_type = other DNA
ttgtaggagcagcataggca

SEQ ID NO: 682 - DNA, 20 bp, synthetic construct
  source 1..20: mol_type = other DNA
tttgtaggagcagcataggc

SEQ ID NO: 683 - DNA, 20 bp, synthetic construct
  source 1..20: mol_type = other DNA
ctgactaacatttgggctag

SEQ ID NO: 684 - DNA, 20 bp, synthetic construct
  source 1..20: mol_type = other DNA
gaacatgagtctaaatgaac

SEQ ID NO: 685 - DNA, 20 bp, synthetic construct
  source 1..20: mol_type = other DNA
ctgaacatgagtctaaatga

SEQ ID NO: 686 - DNA, 20 bp, synthetic construct
  source 1..20: mol_type = other DNA
cctagtggctcaatcagtta

SEQ ID NO: 687 - DNA, 20 bp, synthetic construct
  source 1..20: mol_type = other DNA
acctagtggctcaatcagtt

SEQ ID NO: 688 - DNA, 20 bp, synthetic construct
  source 1..20: mol_type = other DNA
tacctagtggctcaatcagt

SEQ ID NO: 689 - DNA, 20 bp, synthetic construct
  source 1..20: mol_type = other DNA
atacctagtggctcaatcag

SEQ ID NO: 690 - DNA, 20 bp, synthetic construct
  source 1..20: mol_type = other DNA
aaacgcaactgaactggatc

SEQ ID NO: 691 - DNA, 20 bp, synthetic construct
  source 1..20: mol_type = other DNA
agagatcagtcacccaacag

SEQ ID NO: 692 - DNA, 20 bp, synthetic construct
  source 1..20: mol_type = other DNA
cctgcaagcctaagatgaaa

SEQ ID NO: 693 - DNA, 20 bp, synthetic construct
  source 1..20: mol_type = other DNA
gatcagcataactagagatt

SEQ ID NO: 694 - DNA, 20 bp, synthetic construct
  source 1..20: mol_type = other DNA
atagtcaatcagtgccctaa

SEQ ID NO: 695 - DNA, 16 bp, synthetic construct
  source 1..16: mol_type = other DNA
ggacctagccaataag

SEQ ID NO: 696 - DNA, 16 bp, synthetic construct
  source 1..16: mol_type = other DNA
tagcataatctggcac

SEQ ID NO: 697 - DNA, 16 bp, synthetic construct
  source 1..16: mol_type = other DNA
tcctagcataatctgg

SEQ ID NO: 698 - DNA, 16 bp, synthetic construct
  source 1..16: mol_type = other DNA
acatcctagcataatc

SEQ ID NO: 699 - DNA, 16 bp, synthetic construct
  source 1..16: mol_type = other DNA
acgccagctctcaact

SEQ ID NO: 700 - DNA, 16 bp, synthetic construct
  source 1..16: mol_type = other DNA
gacgccagctctcaac

SEQ ID NO: 701 - DNA, 16 bp, synthetic construct
  source 1..16: mol_type = other DNA
tgacgccagctctcaa

SEQ ID NO: 702 - DNA, 16 bp, synthetic construct
  source 1..16: mol_type = other DNA
atgacgccagctctca

SEQ ID NO: 703 - DNA, 16 bp, synthetic construct
  source 1..16: mol_type = other DNA
aatgacgccagctctc

SEQ ID NO: 704 - DNA, 16 bp, synthetic construct
  source 1..16: mol_type = other DNA
taatgacgccagctct

SEQ ID NO: 705 - DNA, 16 bp, synthetic construct
  source 1..16: mol_type = other DNA
ctaatgacgccagctc

SEQ ID NO: 706 - DNA, 16 bp, synthetic construct
  source 1..16: mol_type = other DNA
tctaatgacgccagct

SEQ ID NO: 707 - DNA, 16 bp, synthetic construct
  source 1..16: mol_type = other DNA
ttctaatgacgccagc

SEQ ID NO: 708 - DNA, 16 bp, synthetic construct
  source 1..16: mol_type = other DNA
gttctaatgacgccag

SEQ ID NO: 709 - DNA, 16 bp, synthetic construct
  source 1..16: mol_type = other DNA
tgttctaatgacgcca

SEQ ID NO: 710 - DNA, 16 bp, synthetic construct
  source 1..16: mol_type = other DNA
ctgttctaatgacgcc

SEQ ID NO: 711 - DNA, 16 bp, synthetic construct
  source 1..16: mol_type = other DNA
cctgttctaatgacgc

SEQ ID NO: 712 - DNA, 16 bp, synthetic construct
  source 1..16: mol_type = other DNA
gcctgttctaatgacg

SEQ ID NO: 713 - DNA, 16 bp, synthetic construct
  source 1..16: mol_type = other DNA
ctgccgagacatgcct

SEQ ID NO: 714 - DNA, 16 bp, synthetic construct
  source 1..16: mol_type = other DNA
tcctgccgagacatgc

SEQ ID NO: 715 - DNA, 16 bp, synthetic construct
  source 1..16: mol_type = other DNA
ttcctgccgagacatg

SEQ ID NO: 716 - DNA, 16 bp, synthetic construct
  source 1..16: mol_type = other DNA
cttcctgccgagacat

SEQ ID NO: 717 - DNA, 16 bp, synthetic construct
  source 1..16: mol_type = other DNA
accttcctgccgagac

SEQ ID NO: 718 - DNA, 16 bp, synthetic construct
  source 1..16: mol_type = other DNA
gaccttcctgccgaga

SEQ ID NO: 719 - DNA, 16 bp, synthetic construct
  source 1..16: mol_type = other DNA
cacatagcctcagcga

SEQ ID NO: 720 - DNA, 16 bp, synthetic construct
  source 1..16: mol_type = other DNA
tcacatagcctcagcg

SEQ ID NO: 721 - DNA, 16 bp, synthetic construct
  source 1..16: mol_type = other DNA
gtcccaatttgaagcc

SEQ ID NO: 722 - DNA, 16 bp, synthetic construct
  source 1..16: mol_type = other DNA
caaacggtgagtttca

SEQ ID NO: 723 - DNA, 16 bp, synthetic construct
  source 1..16: mol_type = other DNA
ccaaacggtgagtttc

SEQ ID NO: 724 - DNA, 16 bp, synthetic construct
  source 1..16: mol_type = other DNA
gattagtatgccaggg

SEQ ID NO: 725 - DNA, 16 bp, synthetic construct
  source 1..16: mol_type = other DNA
tgattagtatgccagg

SEQ ID NO: 726 - DNA, 16 bp, synthetic construct
  source 1..16: mol_type = other DNA
gatcattgcatagagc

SEQ ID NO: 727 - DNA, 16 bp, synthetic construct
  source 1..16: mol_type = other DNA
gtagatcattgcatag

SEQ ID NO: 728 - DNA, 16 bp, synthetic construct
  source 1..16: mol_type = other DNA
cgctcaaataatgtgc

SEQ ID NO: 729 - DNA, 16 bp, synthetic construct
  source 1..16: mol_type = other DNA
acgctcaaataatgtg

SEQ ID NO: 730 - DNA, 16 bp, synthetic construct
  source 1..16: mol_type = other DNA
cactaacgctcaaata

SEQ ID NO: 731 - DNA, 16 bp, synthetic construct
  source 1..16: mol_type = other DNA
tcactaacgctcaaat

SEQ ID NO: 732 - DNA, 16 bp, synthetic construct
  source 1..16: mol_type = other DNA
atcactaacgctcaaa

SEQ ID NO: 733 - DNA, 16 bp, synthetic construct
  source 1..16: mol_type = other DNA
tatcactaacgctcaa

SEQ ID NO: 734 - DNA, 16 bp, synthetic construct
  source 1..16: mol_type = other DNA
ttatcactaacgctca

SEQ ID NO: 735 - DNA, 16 bp, synthetic construct
  source 1..16: mol_type = other DNA
acttatcactaacgct

SEQ ID NO: 736 - DNA, 16 bp, synthetic construct
  source 1..16: mol_type = other DNA
cacttatcactaacgc

SEQ ID NO: 737 - DNA, 16 bp, synthetic construct
  source 1..16: mol_type = other DNA
cccatagacataggtc

SEQ ID NO: 738 - DNA, 16 bp, synthetic construct
  source 1..16: mol_type = other DNA
acccatagacataggt

SEQ ID NO: 739 - DNA, 16 bp, synthetic construct
  source 1..16: mol_type = other DNA
gctataactgattccc

SEQ ID NO: 740 - DNA, 16 bp, synthetic construct
  source 1..16: mol_type = other DNA
cgtaacagctcagaca

SEQ ID NO: 741 - DNA, 16 bp, synthetic construct
  source 1..16: mol_type = other DNA
ccgtaacagctcagac

SEQ ID NO: 742 - DNA, 16 bp, synthetic construct
  source 1..16: mol_type = other DNA
tatatatctaggaccc

SEQ ID NO: 743 - DNA, 16 bp, synthetic construct
  source 1..16: mol_type = other DNA
ctatatatctaggacc

SEQ ID NO: 744 - DNA, 16 bp, synthetic construct
  source 1..16: mol_type = other DNA
cctaacgactaaagaa

SEQ ID NO: 745 - DNA, 16 bp, synthetic construct
  source 1..16: mol_type = other DNA
ctcctaacgactaaag

SEQ ID NO: 746 - DNA, 16 bp, synthetic construct
  source 1..16: mol_type = other DNA
cctcctaacgactaaa

SEQ ID NO: 747 - DNA, 16 bp, synthetic construct
  source 1..16: mol_type = other DNA
gcctcctaacgactaa

SEQ ID NO: 748 - DNA, 16 bp, synthetic construct
  source 1..16: mol_type = other DNA
tgcctcctaacgacta

SEQ ID NO: 749 - DNA, 16 bp, synthetic construct
  source 1..16: mol_type = other DNA
atgcctcctaacgact

SEQ ID NO: 750 - DNA, 16 bp, synthetic construct
  source 1..16: mol_type = other DNA
aatgcctcctaacgac

SEQ ID NO: 751 - DNA, 16 bp, synthetic construct
  source 1..16: mol_type = other DNA
aaatgcctcctaacga

SEQ ID NO: 752 - DNA, 16 bp, synthetic construct
  source 1..16: mol_type = other DNA
caaatgcctcctaacg

SEQ ID NO: 753 - DNA, 16 bp, synthetic construct
  source 1..16: mol_type = other DNA
gttctatcaggctcac

SEQ ID NO: 754 - DNA, 16 bp, synthetic construct
  source 1..16: mol_type = other DNA
tagttctatcaggctc

SEQ ID NO: 755 - DNA, 16 bp, synthetic construct
  source 1..16: mol_type = other DNA
ggtaaggaatacactc

SEQ ID NO: 756 - DNA, 16 bp, synthetic construct
  source 1..16: mol_type = other DNA
aacatcgcagttgttc

SEQ ID NO: 757 - DNA, 16 bp, synthetic construct
  source 1..16: mol_type = other DNA
taacatcgcagttgtt

SEQ ID NO: 758 - DNA, 16 bp, synthetic construct
  source 1..16: mol_type = other DNA
gataacatcgcagttg

SEQ ID NO: 759 - DNA, 16 bp, synthetic construct
  source 1..16: mol_type = other DNA
ggataacatcgcagtt

SEQ ID NO: 760 - DNA, 16 bp, synthetic construct
  source 1..16: mol_type = other DNA
aggataacatcgcagt

SEQ ID NO: 761 - DNA, 16 bp, synthetic construct
  source 1..16: mol_type = other DNA
tagaggataacatcgc

SEQ ID NO: 762 - DNA, 16 bp, synthetic construct
  source 1..16: mol_type = other DNA
ttagaggataacatcg

SEQ ID NO: 763 - DNA, 16 bp, synthetic construct
  source 1..16: mol_type = other DNA
agccaggactctacgg

SEQ ID NO: 764 - DNA, 16 bp, synthetic construct
  source 1..16: mol_type = other DNA
cagccaggactctacg

SEQ ID NO: 765 - DNA, 16 bp, synthetic construct
  source 1..16: mol_type = other DNA
aaaccacgcaccagcc

SEQ ID NO: 766 - DNA, 16 bp, synthetic construct
  source 1..16: mol_type = other DNA
cgattccacttcagca

SEQ ID NO: 767 - DNA, 16 bp, synthetic construct
  source 1..16: mol_type = other DNA
ttaaccacgattccac

SEQ ID NO: 768 - DNA, 16 bp, synthetic construct
  source 1..16: mol_type = other DNA
gttaaccacgattcca

SEQ ID NO: 769 - DNA, 16 bp, synthetic construct
  source 1..16: mol_type = other DNA
tgttaaccacgattcc

SEQ ID NO: 770 - DNA, 16 bp, synthetic construct
  source 1..16: mol_type = other DNA
gcctgttaaccacgat

SEQ ID NO: 771 - DNA, 16 bp, synthetic construct
  source 1..16: mol_type = other DNA
ccgtggtaatttgaaa

SEQ ID NO: 772 - DNA, 16 bp, synthetic construct
  source 1..16: mol_type = other DNA
cgtaagaaagcactat

SEQ ID NO: 773 - DNA, 16 bp, synthetic construct
  source 1..16: mol_type = other DNA
cgtgtgtatctcctag

SEQ ID NO: 774 - DNA, 16 bp, synthetic construct
  source 1..16: mol_type = other DNA
gcgtgtgtatctccta

SEQ ID NO: 775 - DNA, 16 bp, synthetic construct
  source 1..16: mol_type = other DNA
cgcaacttcaatatcc

SEQ ID NO: 776 - DNA, 16 bp, synthetic construct
  source 1..16: mol_type = other DNA
acgcaacttcaatatc

SEQ ID NO: 777 - DNA, 16 bp, synthetic construct
  source 1..16: mol_type = other DNA
cacgcaacttcaatat

SEQ ID NO: 778 - DNA, 16 bp, synthetic construct
  source 1..16: mol_type = other DNA
ccacgcaacttcaata

SEQ ID NO: 779 - DNA, 16 bp, synthetic construct
  source 1..16: mol_type = other DNA
gccacgcaacttcaat

SEQ ID NO: 780 - DNA, 16 bp, synthetic construct
  source 1..16: mol_type = other DNA
tgccacgcaacttcaa

SEQ ID NO: 781 - DNA, 16 bp, synthetic construct
  source 1..16: mol_type = other DNA
atctgccacgcaactt

SEQ ID NO: 782 - DNA, 16 bp, synthetic construct
  source 1..16: mol_type = other DNA
catctgccacgcaact

SEQ ID NO: 783 - DNA, 16 bp, synthetic construct
  source 1..16: mol_type = other DNA
aggctaataggtttag

SEQ ID NO: 784 - DNA, 16 bp, synthetic construct
  source 1..16: mol_type = other DNA
cgattcacattgactt

SEQ ID NO: 785 - DNA, 16 bp, synthetic construct
  source 1..16: mol_type = other DNA
tcgattcacattgact

SEQ ID NO: 786 - DNA, 16 bp, synthetic construct
  source 1..16: mol_type = other DNA
atcgattcacattgac

SEQ ID NO: 787 - DNA, 16 bp, synthetic construct
  source 1..16: mol_type = other DNA
agaacctaagatcgat

SEQ ID NO: 788 - DNA, 16 bp, synthetic construct
  source 1..16: mol_type = other DNA
tatgatgtgcccatac

SEQ ID NO: 789 - DNA, 16 bp, synthetic construct
  source 1..16: mol_type = other DNA
tccaaacttagtcagc

SEQ ID NO: 790 - DNA, 16 bp, synthetic construct
  source 1..16: mol_type = other DNA
gtccaaacttagtcag

SEQ ID NO: 791 - DNA, 16 bp, synthetic construct
  source 1..16: mol_type = other DNA
gtacgataaactgtga

SEQ ID NO: 792 - DNA, 16 bp, synthetic construct
  source 1..16: mol_type = other DNA
ggtacgataaactgtg

SEQ ID NO: 793 - DNA, 16 bp, synthetic construct
  source 1..16: mol_type = other DNA
aggtacgataaactgt

SEQ ID NO: 794 - DNA, 16 bp, synthetic construct
  source 1..16: mol_type = other DNA
cctagacattgaccgg

SEQ ID NO: 795 - DNA, 16 bp, synthetic construct
  source 1..16: mol_type = other DNA
tcctagacattgaccg

SEQ ID NO: 796 - DNA, 16 bp, synthetic construct
  source 1..16: mol_type = other DNA
tatgatgtgtaacctc

SEQ ID NO: 797 - DNA, 16 bp, synthetic construct
  source 1..16: mol_type = other DNA
cctatgatgtgtaacc

SEQ ID NO: 798 - DNA, 16 bp, synthetic construct
  source 1..16: mol_type = other DNA
acctatgatgtgtaac

SEQ ID NO: 799 - DNA, 16 bp, synthetic construct
  source 1..16: mol_type = other DNA
ctgataagtggtatcc

SEQ ID NO: 800 - DNA, 16 bp, synthetic construct
  source 1..16: mol_type = other DNA
tcacataggtatagcc

SEQ ID NO: 801 - DNA, 16 bp, synthetic construct
  source 1..16: mol_type = other DNA
gttcacataggtatag

SEQ ID NO: 802 - DNA, 16 bp, synthetic construct
  source 1..16: mol_type = other DNA
ggttcacataggtata

SEQ ID NO: 803 - DNA, 16 bp, synthetic construct
  source 1..16: mol_type = other DNA
gttggttcacataggt

SEQ ID NO: 804 - DNA, 16 bp, synthetic construct
  source 1..16: mol_type = other DNA
agttggttcacatagg

SEQ ID NO: 805 - DNA, 16 bp, synthetic construct
  source 1..16: mol_type = other DNA
gagtcttaactatacc

SEQ ID NO: 806 - DNA, 16 bp, synthetic construct
  source 1..16: mol_type = other DNA
ggagtcttaactatac

SEQ ID NO: 807 - DNA, 16 bp, synthetic construct
  source 1..16: mol_type = other DNA
tcgtgttaggtttgag

SEQ ID NO: 808 - DNA, 16 bp, synthetic construct
  source 1..16: mol_type = other DNA
atcgtgttaggtttga

SEQ ID NO: 809 - DNA, 16 bp, synthetic construct
  source 1..16: mol_type = other DNA
aatcgtgttaggtttg

SEQ ID NO: 810 - DNA, 16 bp, synthetic construct
  source 1..16: mol_type = other DNA
tccttaatcgtgttag

SEQ ID NO: 811 - DNA, 16 bp, synthetic construct
  source 1..16: mol_type = other DNA
gtccttaatcgtgtta

SEQ ID NO: 812 - DNA, 16 bp, synthetic construct
  source 1..16: mol_type = other DNA
atggtggtgtacttgc

SEQ ID NO: 813 - DNA, 16 bp, synthetic construct
  source 1..16: mol_type = other DNA
agtcctctcggcaaga

SEQ ID NO: 814 - DNA, 16 bp, synthetic construct
  source 1..16: mol_type = other DNA
aaccattagagtcctc

SEQ ID NO: 815 - DNA, 16 bp, synthetic construct
  source 1..16: mol_type = other DNA
gaaaccattagagtcc

SEQ ID NO: 816 - DNA, 16 bp, synthetic construct
  source 1..16: mol_type = other DNA
cacgcagagatcaaca

SEQ ID NO: 817 - DNA, 16 bp, synthetic construct
  source 1..16: mol_type = other DNA
tcacgcagagatcaac

SEQ ID NO: 818 - DNA, 16 bp, synthetic construct
  source 1..16: mol_type = other DNA
gtcacgcagagatcaa

SEQ ID NO: 819 - DNA, 16 bp, synthetic construct
  source 1..16: mol_type = other DNA
agtcacgcagagatca

SEQ ID NO: 820 - DNA, 16 bp, synthetic construct
  source 1..16: mol_type = other DNA
cagtcacgcagagatc

SEQ ID NO: 821 - DNA, 16 bp, synthetic construct
  source 1..16: mol_type = other DNA
tgatctggacgatgag

SEQ ID NO: 822 - DNA, 16 bp, synthetic construct
  source 1..16: mol_type = other DNA
aaagttgatctggacg

SEQ ID NO: 823 - DNA, 16 bp, synthetic construct
  source 1..16: mol_type = other DNA
taggttggtctaggaa

SEQ ID NO: 824 - DNA, 16 bp, synthetic construct
  source 1..16: mol_type = other DNA
ttaggttggtctagga

SEQ ID NO: 825 - DNA, 16 bp, synthetic construct
  source 1..16: mol_type = other DNA
tcgaacttagcttatg

SEQ ID NO: 826 - DNA, 16 bp, synthetic construct
  source 1..16: mol_type = other DNA
gtacccacccttacaa

SEQ ID NO: 827 - DNA, 16 bp, synthetic construct
  source 1..16: mol_type = other DNA
gctgacccataatagg

SEQ ID NO: 828 - DNA, 16 bp, synthetic construct
  source 1..16: mol_type = other DNA
cgctgacccataatag

SEQ ID NO: 829 - DNA, 16 bp, synthetic construct
  source 1..16: mol_type = other DNA
tcgctgacccataata

SEQ ID NO: 830 - DNA, 16 bp, synthetic construct
  source 1..16: mol_type = other DNA
atgatagagtcgctga

SEQ ID NO: 831 - DNA, 16 bp, synthetic construct
  source 1..16: mol_type = other DNA
aatgatagagtcgctg

SEQ ID NO: 832 - DNA, 16 bp, synthetic construct
  source 1..16: mol_type = other DNA
aaatgatagagtcgct

SEQ ID NO: 833 - DNA, 16 bp, synthetic construct
  source 1..16: mol_type = other DNA
ccgaaatgatagagtc

SEQ ID NO: 834 - DNA, 16 bp, synthetic construct
  source 1..16: mol_type = other DNA
tccgaaatgatagagt

SEQ ID NO: 835 - DNA, 16 bp, synthetic construct
  source 1..16: mol_type = other DNA
ttccgaaatgatagag

SEQ ID NO: 836 - DNA, 16 bp, synthetic construct
  source 1..16: mol_type = other DNA
ctttccgaaatgatag

SEQ ID NO: 837 - DNA, 16 bp, synthetic construct
  source 1..16: mol_type = other DNA
gttatatgcttagagg

SEQ ID NO: 838 - DNA, 16 bp, synthetic construct
  source 1..16: mol_type = other DNA
actagaaccttgaccc

SEQ ID NO: 839 - DNA, 16 bp, synthetic construct
  source 1..16: mol_type = other DNA
tatcccaggtcactag

SEQ ID NO: 840 - DNA, 16 bp, synthetic construct
  source 1..16: mol_type = other DNA
ctgagagtcatatccc

SEQ ID NO: 841 - DNA, 16 bp, synthetic construct
  source 1..16: mol_type = other DNA
cgccactgagagtcat

SEQ ID NO: 842 - DNA, 16 bp, synthetic construct
  source 1..16: mol_type = other DNA
acgccactgagagtca

SEQ ID NO: 843 - DNA, 16 bp, synthetic construct
  source 1..16: mol_type = other DNA
tacgccactgagagtc

SEQ ID NO: 844 - DNA, 16 bp, synthetic construct
  source 1..16: mol_type = other DNA
atacgccactgagagt

SEQ ID NO: 845 - DNA, 16 bp, synthetic construct
  source 1..16: mol_type = other DNA
catacgccactgagag

SEQ ID NO: 846 - DNA, 16 bp, synthetic construct
  source 1..16: mol_type = other DNA
acatacgccactgaga

SEQ ID NO: 847 - DNA, 16 bp, synthetic construct
  source 1..16: mol_type = other DNA
aacatacgccactgag

SEQ ID NO: 848 - DNA, 16 bp, synthetic construct
  source 1..16: mol_type = other DNA
ataaacatacgccact

SEQ ID NO: 849 - DNA, 16 bp, synthetic construct
  source 1..16: mol_type = other DNA
cataaacatacgccac

SEQ ID NO: 850 - DNA, 16 bp, synthetic construct
  source 1..16: mol_type = other DNA
gacataaacatacgcc

SEQ ID NO: 851 - DNA, 16 bp, synthetic construct
  source 1..16: mol_type = other DNA
gatccaattagagtcc

SEQ ID NO: 852 - DNA, 16 bp, synthetic construct
  source 1..16: mol_type = other DNA
tgatccaattagagtc

SEQ ID NO: 853 - DNA, 16 bp, synthetic construct
  source 1..16: mol_type = other DNA
tgccttggactgatcc

SEQ ID NO: 854 - DNA, 16 bp, synthetic construct
  source 1..16: mol_type = other DNA
atgccttggactgatc

SEQ ID NO: 855 - DNA, 16 bp, synthetic construct
  source 1..16: mol_type = other DNA
gatgccttggactgat

SEQ ID NO: 856 - DNA, 16 bp, synthetic construct
  source 1..16: mol_type = other DNA
tagataggtgagatct

SEQ ID NO: 857 - DNA, 16 bp, synthetic construct
  source 1..16: mol_type = other DNA
ttagataggtgagatc

SEQ ID NO: 858 - DNA, 16 bp, synthetic construct
  source 1..16: mol_type = other DNA
atctccgtggtttgat

SEQ ID NO: 859 - DNA, 16 bp, synthetic construct
  source 1..16: mol_type = other DNA
aatctccgtggtttga

SEQ ID NO: 860 - DNA, 16 bp, synthetic construct
  source 1..16: mol_type = other DNA
acctaatctccgtggt

SEQ ID NO: 861 - DNA, 16 bp, synthetic construct
  source 1..16: mol_type = other DNA
tacctaatctccgtgg

SEQ ID NO: 862 - DNA, 16 bp, synthetic construct
  source 1..16: mol_type = other DNA
gtacctaatctccgtg

SEQ ID NO: 863 - DNA, 16 bp, synthetic construct
  source 1..16: mol_type = other DNA
gtggtagcaagtctta

SEQ ID NO: 864 - DNA, 16 bp, synthetic construct
  source 1..16: mol_type = other DNA
ggtggtagcaagtctt

SEQ ID NO: 865 - DNA, 16 bp, synthetic construct
  source 1..16: mol_type = other DNA
gcaccctaactatttg

SEQ ID NO: 866 - DNA, 16 bp, synthetic construct
  source 1..16: mol_type = other DNA
ggcaccctaactattt

SEQ ID NO: 867 - DNA, 16 bp, synthetic construct
  source 1..16: mol_type = other DNA
tggcaccctaactatt

SEQ ID NO: 868 - DNA, 16 bp, synthetic construct
  source 1..16: mol_type = other DNA
ttggcaccctaactat

SEQ ID NO: 869 - DNA, 16 bp, synthetic construct
  source 1..16: mol_type = other DNA
tttggcaccctaacta

SEQ ID NO: 870 - DNA, 16 bp, synthetic construct
  source 1..16: mol_type = other DNA
ctgagtaggacattgg

SEQ ID NO: 871 - DNA, 16 bp, synthetic construct
  source 1..16: mol_type = other DNA
ctcgactaatcagaat

SEQ ID NO: 872 - DNA, 16 bp, synthetic construct
  source 1..16: mol_type = other DNA
cctcgactaatcagaa

SEQ ID NO: 873 - DNA, 16 bp, synthetic construct
  source 1..16: mol_type = other DNA
ccctcgactaatcaga

SEQ ID NO: 874 - DNA, 16 bp, synthetic construct
  source 1..16: mol_type = other DNA
accctcgactaatcag

SEQ ID NO: 875 - DNA, 16 bp, synthetic construct
  source 1..16: mol_type = other DNA
caccctcgactaatca

SEQ ID NO: 876 - DNA, 16 bp, synthetic construct
  source 1..16: mol_type = other DNA
acaccctcgactaatc

SEQ ID NO: 877 - DNA, 16 bp, synthetic construct
  source 1..16: mol_type = other DNA
aacaccctcgactaat

SEQ ID NO: 878 - DNA, 16 bp, synthetic construct
  source 1..16: mol_type = other DNA
aaacaccctcgactaa

SEQ ID NO: 879 - DNA, 16 bp, synthetic construct
  source 1..16: mol_type = other DNA
caaacaccctcgacta

SEQ ID NO: 880 - DNA, 16 bp, synthetic construct
  source 1..16: mol_type = other DNA
tcaaacaccctcgact

SEQ ID NO: 881 - DNA, 16 bp, synthetic construct
  source 1..16: mol_type = other DNA
atcaaacaccctcgac

SEQ ID NO: 882 - DNA, 16 bp, synthetic construct
  source 1..16: mol_type = other DNA
aatcaaacaccctcga

SEQ ID NO: 883 - DNA, 16 bp, synthetic construct
  source 1..16: mol_type = other DNA
gaatcaaacaccctcg

SEQ ID NO: 884 - DNA, 16 bp, synthetic construct
  source 1..16: mol_type = other DNA
cggtgatgttgtgttt

SEQ ID NO: 885 - DNA, 16 bp, synthetic construct
  source 1..16: mol_type = other DNA
tcggtgatgttgtgtt

SEQ ID NO: 886 - DNA, 16 bp, synthetic construct
  source 1..16: mol_type = other DNA
ttcggtgatgttgtgt

SEQ ID NO: 887 - DNA, 16 bp, synthetic construct
  source 1..16: mol_type = other DNA
tttcggtgatgttgtg

SEQ ID NO: 888 - DNA, 16 bp, synthetic construct
  source 1..16: mol_type = other DNA
ctttcggtgatgttgt

SEQ ID NO: 889 - DNA, 16 bp, synthetic construct
  source 1..16: mol_type = other DNA
gctttcggtgatgttg

SEQ ID NO: 890 - DNA, 16 bp, synthetic construct
  source 1..16: mol_type = other DNA
agctttcggtgatgtt

SEQ ID NO: 891 - DNA, 16 bp, synthetic construct
  source 1..16: mol_type = other DNA
cagctttcggtgatgt

SEQ ID NO: 892 - DNA, 16 bp, synthetic construct
  source 1..16: mol_type = other DNA
ccagctttcggtgatg

SEQ ID NO: 893 - DNA, 16 bp, synthetic construct
  source 1..16: mol_type = other DNA
tcatgccagctttcgg

SEQ ID NO: 894 - DNA, 16 bp, synthetic construct
  source 1..16: mol_type = other DNA
catcttgggtatttcg

SEQ ID NO: 895 - DNA, 16 bp, synthetic construct
  source 1..16: mol_type = other DNA
gtaacccatatctgtg

SEQ ID NO: 896 - DNA, 16 bp, synthetic construct
  source 1..16: mol_type = other DNA
gtatcacctcaacacc

SEQ ID NO: 897 - DNA, 16 bp, synthetic construct
  source 1..16: mol_type = other DNA
gagccttgtcatcaat

SEQ ID NO: 898 - DNA, 16 bp, synthetic construct
  source 1..16: mol_type = other DNA
ctagtgagccttgtca

SEQ ID NO: 899 - DNA, 16 bp, synthetic construct
  source 1..16: mol_type = other DNA
cctagtgagccttgtc

SEQ ID NO: 900 - DNA, 16 bp, synthetic construct
  source 1..16: mol_type = other DNA
acctagtgagccttgt

SEQ ID NO: 901 - DNA, 16 bp, synthetic construct
  source 1..16: mol_type = other DNA
tacctagtgagccttg

SEQ ID NO: 902 - DNA, 16 bp, synthetic construct
  source 1..16: mol_type = other DNA
atacctagtgagcctt

SEQ ID NO: 903 - DNA, 16 bp, synthetic construct
  source 1..16: mol_type = other DNA
tatacctagtgagcct

SEQ ID NO: 904 - DNA, 16 bp, synthetic construct
  source 1..16: mol_type = other DNA
gtatacctagtgagcc

SEQ ID NO: 905 - DNA, 16 bp, synthetic construct
  source 1..16: mol_type = other DNA
gcacacatagttagag

SEQ ID NO: 906 - DNA, 16 bp, synthetic construct
  source 1..16: mol_type = other DNA
tagtatcagtccaggg

SEQ ID NO: 907 - DNA, 16 bp, synthetic construct
  source 1..16: mol_type = other DNA
ctagtatcagtccagg

SEQ ID NO: 908 - DNA, 16 bp, synthetic construct
  source 1..16: mol_type = other DNA
atccatacttcggtgc

SEQ ID NO: 909 - DNA, 16 bp, synthetic construct
  source 1..16: mol_type = other DNA
aatccatacttcggtg

SEQ ID NO: 910 - DNA, 16 bp, synthetic construct
  source 1..16: mol_type = other DNA
caatccatacttcggt

SEQ ID NO: 911 - DNA, 16 bp, synthetic construct
  source 1..16: mol_type = other DNA
gcaatccatacttcgg

SEQ ID NO: 912 - DNA, 16 bp, synthetic construct
  source 1..16: mol_type = other DNA
tgcaatccatacttcg

SEQ ID NO: 913 - DNA, 16 bp, synthetic construct
  source 1..16: mol_type = other DNA
gtgcaatccatacttc

SEQ ID NO: 914 - DNA, 16 bp, synthetic construct
  source 1..16: mol_type = other DNA
gattcaacagtctagg

SEQ ID NO: 915 - DNA, 16 bp, synthetic construct
  source 1..16: mol_type = other DNA
caatatagatcacggt

SEQ ID NO: 916 - DNA, 16 bp, synthetic construct
  source 1..16: mol_type = other DNA
tcaatatagatcacgg

SEQ ID NO: 917 - DNA, 16 bp, synthetic construct
  source 1..16: mol_type = other DNA
cccttcaatatagatc

SEQ ID NO: 918 - DNA, 16 bp, synthetic construct
  source 1..16: mol_type = other DNA
gtattgtccatactgc

SEQ ID NO: 919 - DNA, 16 bp, synthetic construct
  source 1..16: mol_type = other DNA
gtgtattgtccatact

SEQ ID NO: 920 - DNA, 16 bp, synthetic construct
  source 1..16: mol_type = other DNA
agtgtattgtccatac

SEQ ID NO: 921 - DNA, 16 bp, synthetic construct
  source 1..16: mol_type = other DNA
atctagtgtattgtcc

SEQ ID NO: 922 - DNA, 16 bp, synthetic construct
  source 1..16: mol_type = other DNA
catctagtgtattgtc

SEQ ID NO: 923 - DNA, 16 bp, synthetic construct
  source 1..16: mol_type = other DNA
gacacaacatctagtg

SEQ ID NO: 924 - DNA, 16 bp, synthetic construct
  source 1..16: mol_type = other DNA
tagtctactcactggt

SEQ ID NO: 925 - DNA, 16 bp, synthetic construct
  source 1..16: mol_type = other DNA
atagtctactcactgg

SEQ ID NO: 926 - DNA, 16 bp, synthetic construct
  source 1..16: mol_type = other DNA
gcaatagtctactcac

SEQ ID NO: 927 - DNA, 16 bp, synthetic construct
  source 1..16: mol_type = other DNA
gctgcaatagtctact

SEQ ID NO: 928 - DNA, 16 bp, synthetic construct
  source 1..16: mol_type = other DNA
ggaggtgcaatcacgc

SEQ ID NO: 929 - DNA, 16 bp, synthetic construct
  source 1..16: mol_type = other DNA
acgtcctcaatctcaa

SEQ ID NO: 930 - DNA, 16 bp, synthetic construct
  source 1..16: mol_type = other DNA
aaatcctaccctacgt

SEQ ID NO: 931 - DNA, 16 bp, synthetic construct
  source 1..16: mol_type = other DNA
gtatccattccaccgg

SEQ ID NO: 932 - DNA, 16 bp, synthetic construct
  source 1..16: mol_type = other DNA
gctaccagaagagtcc

SEQ ID NO: 933 - DNA, 16 bp, synthetic construct
  source 1..16: mol_type = other DNA
attgggatgattagct

SEQ ID NO: 934 - DNA, 16 bp, synthetic construct
  source 1..16: mol_type = other DNA
tattgggatgattagc

SEQ ID NO: 935 - DNA, 16 bp, synthetic construct
  source 1..16: mol_type = other DNA
gtctgcattagagtgg

SEQ ID NO: 936 - DNA, 16 bp, synthetic construct
  source 1..16: mol_type = other DNA
tggaacgttaattgga

SEQ ID NO: 937 - DNA, 16 bp, synthetic construct
  source 1..16: mol_type = other DNA
atggaacgttaattgg

SEQ ID NO: 938 - DNA, 16 bp, synthetic construct
  source 1..16: mol_type = other DNA
ctgaggaaacgttata

SEQ ID NO: 939 - DNA, 16 bp, synthetic construct
  source 1..16: mol_type = other DNA
accagtatgactcttg

SEQ ID NO: 940 - DNA, 16 bp, synthetic construct
  source 1..16: mol_type = other DNA
tttgataacctcgaac

SEQ ID NO: 941 - DNA, 16 bp, synthetic construct
  source 1..16: mol_type = other DNA
cgagttagccaccatt

SEQ ID NO: 942 - DNA, 16 bp, synthetic construct
  source 1..16: mol_type = other DNA
ccgagttagccaccat

SEQ ID NO: 943 - DNA, 16 bp, synthetic construct
  source 1..16: mol_type = other DNA
cccgagttagccacca

SEQ ID NO: 944 - DNA, 16 bp, synthetic construct
  source 1..16: mol_type = other DNA
acccgagttagccacc

SEQ ID NO: 945 - DNA, 16 bp, synthetic construct
  source 1..16: mol_type = other DNA
cacccgagttagccac

SEQ ID NO: 946 - DNA, 16 bp, synthetic construct
  source 1..16: mol_type = other DNA
tcacccgagttagcca

SEQ ID NO: 947 - DNA, 16 bp, synthetic construct
  source 1..16: mol_type = other DNA
ttcacccgagttagcc

SEQ ID NO: 948 - DNA, 16 bp, synthetic construct
  source 1..16: mol_type = other DNA
attcacccgagttagc

SEQ ID NO: 949 - DNA, 16 bp, synthetic construct
  source 1..16: mol_type = other DNA
taggctggtattgtgt

SEQ ID NO: 950 - DNA, 16 bp, synthetic construct
  source 1..16: mol_type = other DNA
ataggctggtattgtg

SEQ ID NO: 951 - DNA, 16 bp, synthetic construct
  source 1..16: mol_type = other DNA
cataggctggtattgt

SEQ ID NO: 952 - DNA, 16 bp, synthetic construct
  source 1..16: mol_type = other DNA
cgagaccacaacatag

SEQ ID NO: 953 - DNA, 16 bp, synthetic construct
  source 1..16: mol_type = other DNA
gcgagaccacaacata

SEQ ID NO: 954 - DNA, 16 bp, synthetic construct
  source 1..16: mol_type = other DNA
tgcgagaccacaacat

SEQ ID NO: 955 - DNA, 16 bp, synthetic construct
  source 1..16: mol_type = other DNA
atgcgagaccacaaca

SEQ ID NO: 956 - DNA, 16 bp, synthetic construct
  source 1..16: mol_type = other DNA
catgcgagaccacaac

SEQ ID NO: 957 - DNA, 16 bp, synthetic construct
  source 1..16: mol_type = other DNA
cacgtagcttgggaag

SEQ ID NO: 958 - DNA, 16 bp, synthetic construct
  source 1..16: mol_type = other DNA
atcacgtagcttggga

SEQ ID NO: 959 - DNA, 16 bp, synthetic construct
  source 1..16: mol_type = other DNA
aatcacgtagcttggg

SEQ ID NO: 960 - DNA, 16 bp, synthetic construct
  source 1..16: mol_type = other DNA
aaatcacgtagcttgg

SEQ ID NO: 961 - DNA, 16 bp, synthetic construct
  source 1..16: mol_type = other DNA
ggaaatcacgtagctt

SEQ ID NO: 962 - DNA, 16 bp, synthetic construct
  source 1..16: mol_type = other DNA
gggaaatcacgtagct

SEQ ID NO: 963 - DNA, 16 bp, synthetic construct
  source 1..16: mol_type = other DNA
ttaggcataatggttg

SEQ ID NO: 964 - DNA, 16 bp, synthetic construct
  source 1..16: mol_type = other DNA
gggcataataactgac

SEQ ID NO: 965 - DNA, 16 bp, synthetic construct
  source 1..16: mol_type = other DNA
cgaagattgcctcatg

SEQ ID NO: 966 - DNA, 16 bp, synthetic construct
  source 1..16: mol_type = other DNA
tcgaagattgcctcat

SEQ ID NO: 967 - DNA, 16 bp, synthetic construct
  source 1..16: mol_type = other DNA
atcgaagattgcctca

SEQ ID NO: 968 - DNA, 16 bp, synthetic construct
  source 1..16: mol_type = other DNA
gatcgaagattgcctc

SEQ ID NO: 969 - DNA, 16 bp, synthetic construct
  source 1..16: mol_type = other DNA
tctgaatggatcgaag

SEQ ID NO: 970 - DNA, 16 bp, synthetic construct
  source 1..16: mol_type = other DNA
gtctgaatggatcgaa

SEQ ID NO: 971 - DNA, 16 bp, synthetic construct
  source 1..16: mol_type = other DNA
tgtctgaatggatcga

SEQ ID NO: 972 - DNA, 16 bp, synthetic construct
  source 1..16: mol_type = other DNA
ttgtctgaatggatcg

SEQ ID NO: 973 - DNA, 16 bp, synthetic construct
  source 1..16: mol_type = other DNA
gaaccacctccttagt

SEQ ID NO: 974 - DNA, 16 bp, synthetic construct
  source 1..16: mol_type = other DNA
ggatgatacctgattc

SEQ ID NO: 975 - DNA, 16 bp, synthetic construct
  source 1..16: mol_type = other DNA
cgttgaattactggga

SEQ ID NO: 976 - DNA, 16 bp, synthetic construct
  source 1..16: mol_type = other DNA
cctaagaaacgttgaa

SEQ ID NO: 977 - DNA, 16 bp, synthetic construct
  source 1..16: mol_type = other DNA
tcctaagaaacgttga

SEQ ID NO: 978 - DNA, 16 bp, synthetic construct
  source 1..16: mol_type = other DNA
atcaatgggagtgcta

SEQ ID NO: 979 - DNA, 16 bp, synthetic construct
  source 1..16: mol_type = other DNA
ccctccacgaaattaa

SEQ ID NO: 980 - DNA, 16 bp, synthetic construct
  source 1..16: mol_type = other DNA
gccctccacgaaatta

SEQ ID NO: 981 - DNA, 16 bp, synthetic construct
  source 1..16: mol_type = other DNA
tgccctccacgaaatt

SEQ ID NO: 982 - DNA, 16 bp, synthetic construct
  source 1..16: mol_type = other DNA
atgccctccacgaaat

SEQ ID NO: 983 - DNA, 16 bp, synthetic construct
  source 1..16: mol_type = other DNA
gatgccctccacgaaa

SEQ ID NO: 984 - DNA, 16 bp, synthetic construct
  source 1..16: mol_type = other DNA
agatgccctccacgaa

SEQ ID NO: 985 - DNA, 16 bp, synthetic construct
  source 1..16: mol_type = other DNA
tcgtacttggaagcca

SEQ ID NO: 986 - DNA, 16 bp, synthetic construct
  source 1..16: mol_type = other DNA
atcgtacttggaagcc

SEQ ID NO: 987 - DNA, 16 bp, synthetic construct
  source 1..16: mol_type = other DNA
gatcgtacttggaagc

SEQ ID NO: 988 - DNA, 16 bp, synthetic construct
  source 1..16: mol_type = other DNA
agatcgtacttggaag

SEQ ID NO: 989 - DNA, 16 bp, synthetic construct
  source 1..16: mol_type = other DNA
tagatcgtacttggaa

SEQ ID NO: 990 - DNA, 16 bp, synthetic construct
  source 1..16: mol_type = other DNA
atagatcgtacttgga

SEQ ID NO: 991 - DNA, 16 bp, synthetic construct
  source 1..16: mol_type = other DNA
catagatcgtacttgg

SEQ ID NO: 992 - DNA, 16 bp, synthetic construct
  source 1..16: mol_type = other DNA
ccatagatcgtacttg

SEQ ID NO: 993 - DNA, 16 bp, synthetic construct
  source 1..16: mol_type = other DNA
accatagatcgtactt

SEQ ID NO: 994 - DNA, 16 bp, synthetic construct
  source 1..16: mol_type = other DNA
aaccatagatcgtact

SEQ ID NO: 995 - DNA, 16 bp, synthetic construct
  source 1..16: mol_type = other DNA
gaaccatagatcgtac

SEQ ID NO: 996 - DNA, 16 bp, synthetic construct
  source 1..16: mol_type = other DNA
ggaaccatagatcgta

SEQ ID NO: 997 - DNA, 16 bp, synthetic construct
  source 1..16: mol_type = other DNA
gattgtgatgtgcgag

SEQ ID NO: 998 - DNA, 16 bp, synthetic construct
  source 1..16: mol_type = other DNA
acgtttattcctgtag

SEQ ID NO: 999 - DNA, 16 bp, synthetic construct
  source 1..16: mol_type = other DNA
gtgaattgtaagtcgt

SEQ ID NO: 1000 - DNA, 16 bp, synthetic construct
  source 1..16: mol_type = other DNA
ccgtgaattgtaagtc

SEQ ID NO: 1001 - DNA, 16 bp, synthetic construct
  source 1..16: mol_type = other DNA
accgtgaattgtaagt

SEQ ID NO: 1002 - DNA, 16 bp, synthetic construct
  source 1..16: mol_type = other DNA
gaccgtgaattgtaag

SEQ ID NO: 1003 - DNA, 16 bp, synthetic construct
  source 1..16: mol_type = other DNA
ggaccgtgaattgtaa

SEQ ID NO: 1004 - DNA, 16 bp, synthetic construct
  source 1..16: mol_type = other DNA
tggaccgtgaattgta

SEQ ID NO: 1005 - DNA, 16 bp, synthetic construct
  source 1..16: mol_type = other DNA
ttggaccgtgaattgt

SEQ ID NO: 1006 - DNA, 16 bp, synthetic construct
  source 1..16: mol_type = other DNA
tttggaccgtgaattg

SEQ ID NO: 1007 - DNA, 16 bp, synthetic construct
  source 1..16: mol_type = other DNA
tgcacatctcgctggt

SEQ ID NO: 1008 - DNA, 16 bp, synthetic construct
  source 1..16: mol_type = other DNA
atgcacatctcgctgg

SEQ ID NO: 1009 - DNA, 16 bp, synthetic construct
  source 1..16: mol_type = other DNA
tatgcacatctcgctg

SEQ ID NO: 1010 - DNA, 16 bp, synthetic construct
  source 1..16: mol_type = other DNA
atatgcacatctcgct

SEQ ID NO: 1011 - DNA, 16 bp, synthetic construct
  source 1..16: mol_type = other DNA
catatgcacatctcgc

SEQ ID NO: 1012 - DNA, 16 bp, synthetic construct
  source 1..16: mol_type = other DNA
tcatatgcacatctcg

SEQ ID NO: 1013 - DNA, 16 bp, synthetic construct
  source 1..16: mol_type = other DNA
gtatcattgttcagcc

SEQ ID NO: 1014 - DNA, 16 bp, synthetic construct
  source 1..16: mol_type = other DNA
accatacctgtgtatc

SEQ ID NO: 1015 - DNA, 16 bp, synthetic construct
  source 1..16: mol_type = other DNA
ggttaggtagcatcac

SEQ ID NO: 1016 - DNA, 16 bp, synthetic construct
  source 1..16: mol_type = other DNA
aaggttaggtagcatc

SEQ ID NO: 1017 - DNA, 16 bp, synthetic construct
  source 1..16: mol_type = other DNA
caaggttaggtagcat

SEQ ID NO: 1018 - DNA, 16 bp, synthetic construct
  source 1..16: mol_type = other DNA
ggctgttgatgattgc

SEQ ID NO: 1019 - DNA, 16 bp, synthetic construct
  source 1..16: mol_type = other DNA
tacgattcaaagccac

SEQ ID NO: 1020 - DNA, 16 bp, synthetic construct
  source 1..16: mol_type = other DNA
cttacgattcaaagcc

SEQ ID NO: 1021 - DNA, 16 bp, synthetic construct
  source 1..16: mol_type = other DNA
acttacgattcaaagc

SEQ ID NO: 1022 - DNA, 16 bp, synthetic construct
  source 1..16: mol_type = other DNA
ttccgagtaagatttg

SEQ ID NO: 1023 - DNA, 16 bp, synthetic construct
  source 1..16: mol_type = other DNA
catttccgagtaagat

SEQ ID NO: 1024 - DNA, 16 bp, synthetic construct
  source 1..16: mol_type = other DNA
agatggataccttagg

SEQ ID NO: 1025 - DNA, 16 bp, synthetic construct
  source 1..16: mol_type = other DNA
acgaccaacagctctg

SEQ ID NO: 1026 - DNA, 16 bp, synthetic construct
  source 1..16: mol_type = other DNA
aacgaccaacagctct

SEQ ID NO: 1027 - DNA, 16 bp, synthetic construct
  source 1..16: mol_type = other DNA
aaacgaccaacagctc

SEQ ID NO: 1028 - DNA, 16 bp, synthetic construct
  source 1..16: mol_type = other DNA
ccaaacgaccaacagc

SEQ ID NO: 1029 - DNA, 16 bp, synthetic construct
  source 1..16: mol_type = other DNA
accaaacgaccaacag

SEQ ID NO: 1030 - DNA, 16 bp, synthetic construct
  source 1..16: mol_type = other DNA
caccaaacgaccaaca

SEQ ID NO: 1031 - DNA, 16 bp, synthetic construct
  source 1..16: mol_type = other DNA
ccaccaaacgaccaac

SEQ ID NO: 1032 - DNA, 16 bp, synthetic construct
  source 1..16: mol_type = other DNA
gccaccaaacgaccaa

SEQ ID NO: 1033 - DNA, 16 bp, synthetic construct
  source 1..16: mol_type = other DNA
agaatcgtttgtcttg

SEQ ID NO: 1034 - DNA, 16 bp, synthetic construct
  source 1..16: mol_type = other DNA
ctcagaatcgtttgtc

SEQ ID NO: 1035 - DNA, 16 bp, synthetic construct
  source 1..16: mol_type = other DNA
actcagaatcgtttgt

SEQ ID NO: 1036 - DNA, 16 bp, synthetic construct
  source 1..16: mol_type = other DNA
aactcagaatcgtttg

SEQ ID NO: 1037 - DNA, 16 bp, synthetic construct
  source 1..16: mol_type = other DNA
cgactagagccacatc

SEQ ID NO: 1038 - DNA, 16 bp, synthetic construct
  source 1..16: mol_type = other DNA
ccgactagagccacat

SEQ ID NO: 1039 - DNA, 16 bp, synthetic construct
  source 1..16: mol_type = other DNA
accgactagagccaca

SEQ ID NO: 1040 - DNA, 16 bp, synthetic construct
  source 1..16: mol_type = other DNA
gatatgagctatggac

SEQ ID NO: 1041 - DNA, 16 bp, synthetic construct
  source 1..16: mol_type = other DNA
cttcattgaccgtgag

SEQ ID NO: 1042 - DNA, 16 bp, synthetic construct
  source 1..16: mol_type = other DNA
acttcattgaccgtga

SEQ ID NO: 1043 - DNA, 16 bp, synthetic construct
  source 1..16: mol_type = other DNA
aacttcattgaccgtg

SEQ ID NO: 1044 - DNA, 16 bp, synthetic construct
  source 1..16: mol_type = other DNA
aaacttcattgaccgt

SEQ ID NO: 1045 - DNA, 16 bp, synthetic construct
  source 1..16: mol_type = other DNA
taaacttcattgaccg

SEQ ID NO: 1046 - DNA, 16 bp, synthetic construct
  source 1..16: mol_type = other DNA
cgtgagatgttaatag

SEQ ID NO: 1047 - DNA, 16 bp, synthetic construct
  source 1..16: mol_type = other DNA
ccgtgagatgttaata

SEQ ID NO: 1048 - DNA, 16 bp, synthetic construct
  source 1..16: mol_type = other DNA
cccgtgagatgttaat

SEQ ID NO: 1049 - DNA, 17 bp, synthetic construct
  source 1..17: mol_type = other DNA
acatcctagcataatct

SEQ ID NO: 1050 - DNA, 17 bp, synthetic construct
  source 1..17: mol_type = other DNA
gtaacacccagcatctg

SEQ ID NO: 1051 - DNA, 17 bp, synthetic construct
  source 1..17: mol_type = other DNA
tgtaacacccagcatct

SEQ ID NO: 1052 - DNA, 17 bp, synthetic construct
  source 1..17: mol_type = other DNA
atgatgtttagatgctc

SEQ ID NO: 1053 - DNA, 17 bp, synthetic construct
  source 1..17: mol_type = other DNA
gaacttagcttatgatg

SEQ ID NO: 1054 - DNA, 17 bp, synthetic construct
  source 1..17: mol_type = other DNA
aacgttgaattactggg

SEQ ID NO: 1055 - DNA, 17 bp, synthetic construct
  source 1..17: mol_type = other DNA
aaacgttgaattactgg

SEQ ID NO: 1056 - DNA, 17 bp, synthetic construct
  source 1..17: mol_type = other DNA
agggcacatgttggatt

SEQ ID NO: 1057 - DNA, 17 bp, synthetic construct
  source 1..17: mol_type = other DNA
aagggcacatgttggat

SEQ ID NO: 1058 - DNA, 18 bp, synthetic construct
  source 1..18: mol_type = other DNA
gcaccagccaggactcta

SEQ ID NO: 1059 - DNA, 18 bp, synthetic construct
  source 1..18: mol_type = other DNA
aaaccacgcaccagccag

SEQ ID NO: 1060 - DNA, 18 bp, synthetic construct
  source 1..18: mol_type = other DNA
cagccttcaagtaaattc

SEQ ID NO: 1061 - DNA, 18 bp, synthetic construct
  source 1..18: mol_type = other DNA
ctaattcagccttcaagt

SEQ ID NO: 1062 - DNA, 18 bp, synthetic construct
  source 1..18: mol_type = other DNA
gataccttcagtcccaag

SEQ ID NO: 1063 - DNA, 18 bp, synthetic construct
  source 1..18: mol_type = other DNA
tgataccttcagtcccaa

SEQ ID NO: 1064 - DNA, 19 bp, synthetic construct
  source 1..19: mol_type = other DNA
ttggttcacataggtatag

SEQ ID NO: 1065 - DNA, 19 bp, synthetic construct
  source 1..19: mol_type = other DNA
gttggttcacataggtata

SEQ ID NO: 1066 - DNA, 19 bp, synthetic construct
  source 1..19: mol_type = other DNA
tgaggagacagcaattcac

SEQ ID NO: 1067 - DNA, 19 bp, synthetic construct
  source 1..19: mol_type = other DNA
ttgaggagacagcaattca

SEQ ID NO: 1068 - DNA, 20 bp, synthetic construct
  source 1..20: mol_type = other DNA
gatgtgtaacctcaatttct

SEQ ID NO: 1069 - DNA, 20 bp, synthetic construct
  source 1..20: mol_type = other DNA
acctatgatgtgtaacctca

SEQ ID NO: 1070 - DNA, 20 bp, synthetic construct
  source 1..20: mol_type = other DNA
gtacagaatccaatgacaga

SEQ ID NO: 1071 - DNA, 20 bp, synthetic construct
  source 1..20: mol_type = other DNA
agtacagaatccaatgacag

SEQ ID NO: 1072 - DNA, 20 bp, synthetic construct
  source 1..20: mol_type = other DNA
aaacaccttgttcgctttgg

SEQ ID NO: 1073 - DNA, 20 bp, synthetic construct
  source 1..20: mol_type = other DNA
gtctctcattacaaatggtg

SEQ ID NO: 1074 - DNA, 16 bp, synthetic construct
  source 1..16: mol_type = other DNA
ctgccgcttgtaaacc

SEQ ID NO: 1075 - DNA, 16 bp, synthetic construct
  source 1..16: mol_type = other DNA
actgccgcttgtaaac

SEQ ID NO: 1076 - DNA, 16 bp, synthetic construct
  source 1..16: mol_type = other DNA
aactgccgcttgtaaa

SEQ ID NO: 1077 - DNA, 16 bp, synthetic construct
  source 1..16: mol_type = other DNA
aaactgccgcttgtaa

SEQ ID NO: 1078 - DNA, 16 bp, synthetic construct
  source 1..16: mol_type = other DNA
ggaaactgccgcttgt

SEQ ID NO: 1079 - DNA, 16 bp, synthetic construct
  source 1..16: mol_type = other DNA
atgaagacacacccgg

SEQ ID NO: 1080 - DNA, 16 bp, synthetic construct
  source 1..16: mol_type = other DNA
cgactagagccacatc

SEQ ID NO: 1081 - DNA, 16 bp, synthetic construct
  source 1..16: mol_type = other DNA
ccgactagagccacat

SEQ ID NO: 1082 - DNA, 16 bp, synthetic construct
  source 1..16: mol_type = other DNA
accgactagagccaca

SEQ ID NO: 1083 - DNA, 16 bp, synthetic construct
  source 1..16: mol_type = other DNA
aaccgactagagccac

SEQ ID NO: 1084 - DNA, 16 bp, synthetic construct
  source 1..16: mol_type = other DNA
aaaccgactagagcca

SEQ ID NO: 1085 - DNA, 16 bp, synthetic construct
  source 1..16: mol_type = other DNA
taaaccgactagagcc

SEQ ID NO: 1086 - DNA, 16 bp, synthetic construct
  source 1..16: mol_type = other DNA
ctaaaccgactagagc

SEQ ID NO: 1087 - DNA, 16 bp, synthetic construct
  source 1..16: mol_type = other DNA
actaaaccgactagag

SEQ ID NO: 1088 - DNA, 16 bp, synthetic construct
  source 1..16: mol_type = other DNA
gactaaaccgactaga

SEQ ID NO: 1089 - DNA, 16 bp, synthetic construct
  source 1..16: mol_type = other DNA
gattacccacttcaag

SEQ ID NO: 1090 - DNA, 16 bp, synthetic construct
  source 1..16: mol_type = other DNA
gagctatgtcatgtcc

SEQ ID NO: 1091 - DNA, 16 bp, synthetic construct
  source 1..16: mol_type = other DNA
gactttgcacttcgta

SEQ ID NO: 1092 - DNA, 16 bp, synthetic construct
  source 1..16: mol_type = other DNA
agttagagttaggcgt

SEQ ID NO: 1093 - DNA, 16 bp, synthetic construct
  source 1..16: mol_type = other DNA
gacacctcaagttaga

SEQ ID NO: 1094 - DNA, 16 bp, synthetic construct
  source 1..16: mol_type = other DNA
tgacacctcaagttag

SEQ ID NO: 1095 - DNA, 16 bp, synthetic construct
  source 1..16: mol_type = other DNA
gtctaggttgcacgtt

SEQ ID NO: 1096 - DNA, 16 bp, synthetic construct
  source 1..16: mol_type = other DNA
ggtctaggttgcacgt

SEQ ID NO: 1097 - DNA, 16 bp, synthetic construct
  source 1..16: mol_type = other DNA
aacctgctagatcttg

SEQ ID NO: 1098 - DNA, 16 bp, synthetic construct
  source 1..16: mol_type = other DNA
caacctgctagatctt

SEQ ID NO: 1099 - DNA, 16 bp, synthetic construct
  source 1..16: mol_type = other DNA
tcaacctgctagatct

SEQ ID NO: 1100 - DNA, 16 bp, synthetic construct
  source 1..16: mol_type = other DNA
gaacacacttcgagag

SEQ ID NO: 1101 - DNA, 16 bp, synthetic construct
  source 1..16: mol_type = other DNA
agcagaacacacttcg

SEQ ID NO: 1102 - DNA, 16 bp, synthetic construct
  source 1..16: mol_type = other DNA
cgctgttccattaaca

SEQ ID NO: 1103 - DNA, 16 bp, synthetic construct
  source 1..16: mol_type = other DNA
tagtcttaatcctggc

SEQ ID NO: 1104 - DNA, 16 bp, synthetic construct
  source 1..16: mol_type = other DNA
caagggatgatagctc

SEQ ID NO: 1105 - DNA, 16 bp, synthetic construct
  source 1..16: mol_type = other DNA
ggatcacactaaaccc

SEQ ID NO: 1106 - DNA, 16 bp, synthetic construct
  source 1..16: mol_type = other DNA
ccaataacccattgcc

SEQ ID NO: 1107 - DNA, 16 bp, synthetic construct
  source 1..16: mol_type = other DNA
gccaataacccattgc

SEQ ID NO: 1108 - DNA, 16 bp, synthetic construct
  source 1..16: mol_type = other DNA
taccttgccaataacc

SEQ ID NO: 1109 - DNA, 16 bp, synthetic construct
  source 1..16: mol_type = other DNA
gtaccttgccaataac

SEQ ID NO: 1110 - DNA, 16 bp, synthetic construct
  source 1..16: mol_type = other DNA
caccctaatagtgttg

SEQ ID NO: 1111 - DNA, 16 bp, synthetic construct
  source 1..16: mol_type = other DNA
gtctcaccctaatagt

SEQ ID NO: 1112 - DNA, 16 bp, synthetic construct
  source 1..16: mol_type = other DNA
acttatgtggctccgg

SEQ ID NO: 1113 - DNA, 16 bp, synthetic construct
  source 1..16: mol_type = other DNA
cggttatacagatgct

SEQ ID NO: 1114 - DNA, 16 bp, synthetic construct
  source 1..16: mol_type = other DNA
aggcatggattatacc

SEQ ID NO: 1115 - DNA, 16 bp, synthetic construct
  source 1..16: mol_type = other DNA
taggcatggattatac

SEQ ID NO: 1116 - DNA, 16 bp, synthetic construct
  source 1..16: mol_type = other DNA
accagagatcgccctc

SEQ ID NO: 1117 - DNA, 16 bp, synthetic construct
  source 1..16: mol_type = other DNA
taccagagatcgccct

SEQ ID NO: 1118 - DNA, 16 bp, synthetic construct
  source 1..16: mol_type = other DNA
ataccagagatcgccc

SEQ ID NO: 1119 - DNA, 16 bp, synthetic construct
  source 1..16: mol_type = other DNA
tatccgtcaggcaaag

SEQ ID NO: 1120 - DNA, 16 bp, synthetic construct
  source 1..16: mol_type = other DNA
gtatccgtcaggcaaa

SEQ ID NO: 1121 - DNA, 16 bp, synthetic construct
  source 1..16: mol_type = other DNA
gagatagattcttcgt

SEQ ID NO: 1122 - DNA, 16 bp, synthetic construct
  source 1..16: mol_type = other DNA
aggctacattacctcc

SEQ ID NO: 1123 - DNA, 16 bp, synthetic construct
  source 1..16: mol_type = other DNA
ctaggctacattacct

SEQ ID NO: 1124 - DNA, 16 bp, synthetic construct
  source 1..16: mol_type = other DNA
actaggctacattacc

SEQ ID NO: 1125 - DNA, 16 bp, synthetic construct
  source 1..16: mol_type = other DNA
cactaggctacattac

SEQ ID NO: 1126 - DNA, 16 bp, synthetic construct
  source 1..16: mol_type = other DNA
tcgtgtttattgctgg

SEQ ID NO: 1127 - DNA, 16 bp, synthetic construct
  source 1..16: mol_type = other DNA
gttgattgtgatccag

SEQ ID NO: 1128 - DNA, 16 bp, synthetic construct
  source 1..16: mol_type = other DNA
gtttgtgacgcctgcc

SEQ ID NO: 1129 - DNA, 16 bp, synthetic construct
  source 1..16: mol_type = other DNA
agtttgtgacgcctgc

SEQ ID NO: 1130 - DNA, 16 bp, synthetic construct
  source 1..16: mol_type = other DNA
aagtttgtgacgcctg

SEQ ID NO: 1131 - DNA, 16 bp, synthetic construct
  source 1..16: mol_type = other DNA
aaagtttgtgacgcct

SEQ ID NO: 1132 - DNA, 16 bp, synthetic construct
  source 1..16: mol_type = other DNA
gagcccatctgattgc

SEQ ID NO: 1133 - DNA, 16 bp, synthetic construct
  source 1..16: mol_type = other DNA
cgtgactccagaatgt

SEQ ID NO: 1134 - DNA, 16 bp, synthetic construct
  source 1..16: mol_type = other DNA
ccgtgactccagaatg

SEQ ID NO: 1135 - DNA, 16 bp, synthetic construct
  source 1..16: mol_type = other DNA
atgatcctccgtgact

SEQ ID NO: 1136 - DNA, 16 bp, synthetic construct
  source 1..16: mol_type = other DNA
gatgatcctccgtgac

SEQ ID NO: 1137 - DNA, 16 bp, synthetic construct
  source 1..16: mol_type = other DNA
gattgaacacgttgtt

SEQ ID NO: 1138 - DNA, 16 bp, synthetic construct
  source 1..16: mol_type = other DNA
tgattgaacacgttgt

SEQ ID NO: 1139 - DNA, 16 bp, synthetic construct
  source 1..16: mol_type = other DNA
ttgattgaacacgttg

SEQ ID NO: 1140 - DNA, 16 bp, synthetic construct
  source 1..16: mol_type = other DNA
gttgattgaacacgtt

SEQ ID NO: 1141 - DNA, 16 bp, synthetic construct
  source 1..16: mol_type = other DNA
agttgattgaacacgt

SEQ ID NO: 1142 - DNA, 16 bp, synthetic construct
  source 1..16: mol_type = other DNA
tagttgattgaacacg

SEQ ID NO: 1143 - DNA, 16 bp, synthetic construct
  source 1..16: mol_type = other DNA
gtagttgattgaacac

SEQ ID NO: 1144 - DNA, 16 bp, synthetic construct
  source 1..16: mol_type = other DNA
aggtagttgtaggctt

SEQ ID NO: 1145 - DNA, 16 bp, synthetic construct
  source 1..16: mol_type = other DNA
gaggtagttgtaggct

SEQ ID NO: 1146 - DNA, 16 bp, synthetic construct
  source 1..16: mol_type = other DNA
gccagtcaataatccc

SEQ ID NO: 1147 - DNA, 16 bp, synthetic construct
  source 1..16: mol_type = other DNA
gaccttagagccagtc

SEQ ID NO: 1148 - DNA, 16 bp, synthetic construct
  source 1..16: mol_type = other DNA
ccctagaataagtacc

SEQ ID NO: 1149 - DNA, 16 bp, synthetic construct
  source 1..16: mol_type = other DNA
gccctagaataagtac

SEQ ID NO: 1150 - DNA, 16 bp, synthetic construct
  source 1..16: mol_type = other DNA
actctgcgttaggaat

SEQ ID NO: 1151 - DNA, 16 bp, synthetic construct
  source 1..16: mol_type = other DNA
cactctgcgttaggaa

SEQ ID NO: 1152 - DNA, 16 bp, synthetic construct
  source 1..16: mol_type = other DNA
acagccgactcaaagc

SEQ ID NO: 1153 - DNA, 16 bp, synthetic construct
  source 1..16: mol_type = other DNA
ttacagccgactcaaa

SEQ ID NO: 1154 - DNA, 16 bp, synthetic construct
  source 1..16: mol_type = other DNA
aagagcataacgtacc

SEQ ID NO: 1155 - DNA, 16 bp, synthetic construct
  source 1..16: mol_type = other DNA
taagagcataacgtac

SEQ ID NO: 1156 - DNA, 16 bp, synthetic construct
  source 1..16: mol_type = other DNA
ctaagagcataacgta

SEQ ID NO: 1157 - DNA, 16 bp, synthetic construct
  source 1..16: mol_type = other DNA
actaagagcataacgt

SEQ ID NO: 1158 - DNA, 16 bp, synthetic construct
  source 1..16: mol_type = other DNA
tactaagagcataacg

SEQ ID NO: 1159 - DNA, 16 bp, synthetic construct
  source 1..16: mol_type = other DNA
cgccctgaaacccaac

SEQ ID NO: 1160 - DNA, 17 bp, synthetic construct
  source 1..17: mol_type = other DNA
atgaaacatcaatccag

SEQ ID NO: 1161 - DNA, 17 bp, synthetic construct
  source 1..17: mol_type = other DNA
attagccattcccagcc

SEQ ID NO: 1162 - DNA, 17 bp, synthetic construct
  source 1..17: mol_type = other DNA
cagcttaaggatgtatt

SEQ ID NO: 1163 - DNA, 17 bp, synthetic construct
  source 1..17: mol_type = other DNA
tagaacagcttaaggat

SEQ ID NO: 1164 - DNA, 17 bp, synthetic construct
  source 1..17: mol_type = other DNA
gttgactctgccaatta

SEQ ID NO: 1165 - DNA, 17 bp, synthetic construct
  source 1..17: mol_type = other DNA
tgttgactctgccaatt

SEQ ID NO: 1166 - DNA, 18 bp, synthetic construct
  source 1..18: mol_type = other DNA
gccaataacccattgcca

SEQ ID NO: 1167 - DNA, 18 bp, synthetic construct
  source 1..18: mol_type = other DNA
tgccaataacccattgcc

SEQ ID NO: 1168 - DNA, 18 bp, synthetic construct
  source 1..18: mol_type = other DNA
tacctagtgacccaatgc

SEQ ID NO: 1169 - DNA, 18 bp, synthetic construct
  source 1..18: mol_type = other DNA
gtacctagtgacccaatg

SEQ ID NO: 1170 - DNA, 18 bp, synthetic construct
  source 1..18: mol_type = other DNA
taaacacactcgctcact

SEQ ID NO: 1171 - DNA, 18 bp, synthetic construct
  source 1..18: mol_type = other DNA
ataaacacactcgctcac

SEQ ID NO: 1172 - DNA, 18 bp, synthetic construct
  source 1..18: mol_type = other DNA
tttacctcgaatcaagct

SEQ ID NO: 1173 - DNA, 18 bp, synthetic construct
  source 1..18: mol_type = other DNA
aagtcatcttctggttgt

SEQ ID NO: 1174 - DNA, 18 bp, synthetic construct
  source 1..18: mol_type = other DNA
acatttcaagaagctacg

SEQ ID NO: 1175 - DNA, 18 bp, synthetic construct
  source 1..18: mol_type = other DNA
ctaatgagcatagccagg

SEQ ID NO: 1176 - DNA, 19 bp, synthetic construct
  source 1..19: mol_type = other DNA
cgactagagccacatcagc

SEQ ID NO: 1177 - DNA, 19 bp, synthetic construct
  source 1..19: mol_type = other DNA
aaacaccttgttcgctttg

SEQ ID NO: 1178 - DNA, 19 bp, synthetic construct
  source 1..19: mol_type = other DNA
tctctcattacaaatggtg

SEQ ID NO: 1179 - DNA, 19 bp, synthetic construct
  source 1..19: mol_type = other DNA
taaacaggtaaagctatcc

SEQ ID NO: 1180 - DNA, 19 bp, synthetic construct
  source 1..19: mol_type = other DNA
cttccatcagtataagatc

SEQ ID NO: 1181 - DNA, 19 bp, synthetic construct
  source 1..19: mol_type = other DNA
gtacatacagcttagatca

SEQ ID NO: 1182 - DNA, 19 bp, synthetic construct
  source 1..19: mol_type = other DNA
agtacatacagcttagatc

SEQ ID NO: 1183 - DNA, 19 bp, synthetic construct
  source 1..19: mol_type = other DNA
gtatcagcctctgtgaaac

SEQ ID NO: 1184 - DNA, 19 bp, synthetic construct
  source 1..19: mol_type = other DNA
tgtatcagcctctgtgaaa

SEQ ID NO: 1185 - DNA, 19 bp, synthetic construct
  source 1..19: mol_type = other DNA
aacttacacatctgcttga

SEQ ID NO: 1186 - DNA, 19 bp, synthetic construct
  source 1..19: mol_type = other DNA
taacttacacatctgcttg

SEQ ID NO: 1187 - DNA, 20 bp, synthetic construct
  source 1..20: mol_type = other DNA
gctaaattctattcaacctg

SEQ ID NO: 1188 - DNA, 20 bp, synthetic construct
  source 1..20: mol_type = other DNA
aaagcttctcctctcattgg

SEQ ID NO: 1189 - DNA, 20 bp, synthetic construct
  source 1..20: mol_type = other DNA
ggcacaaattagaacagctt

SEQ ID NO: 1190 - DNA, 20 bp, synthetic construct
  source 1..20: mol_type = other DNA
gggcacaaattagaacagct

SEQ ID NO: 1191 - DNA, 20 bp, synthetic construct
  source 1..20: mol_type = other DNA
atctggtaacatcctatggc

SEQ ID NO: 1192 - DNA, 20 bp, synthetic construct
  source 1..20: mol_type = other DNA
taaagatagcaccatgccat

SEQ ID NO: 1193 - DNA, 20 bp, synthetic construct
  source 1..20: mol_type = other DNA
tgtcatctttaagctacaga

SEQ ID NO: 1194 - DNA, 20 bp, synthetic construct
  source 1..20: mol_type = other DNA
tctgtcatctttaagctaca

SEQ ID NO: 1195 - DNA, 20 bp, synthetic construct
  source 1..20: mol_type = other DNA
cttcagtgtggtgtttgtat

SEQ ID NO: 1196 - DNA, 20 bp, synthetic construct
  source 1..20: mol_type = other DNA
tgatttgaccctgtaattgc

SEQ ID NO: 1197 - DNA, 20 bp, synthetic construct
  source 1..20: mol_type = other DNA
aagcacattaacacccactg

SEQ ID NO: 1198 - DNA, 20 bp, synthetic construct
  source 1..20: mol_type = other DNA
gaagcacattaacacccact

SEQ ID NO: 1199 - DNA, 16 bp, synthetic construct
  source 1..16: mol_type = other DNA
gccaaggttagtgagc

SEQ ID NO: 1200 - DNA, 16 bp, synthetic construct
  source 1..16: mol_type = other DNA
gtctaaagattgggat

SEQ ID NO: 1201 - DNA, 16 bp, synthetic construct
  source 1..16: mol_type = other DNA
gccttaatcagttgtc

SEQ ID NO: 1202 - DNA, 16 bp, synthetic construct
  source 1..16: mol_type = other DNA
ccataacttgattagc

SEQ ID NO: 1203 - DNA, 16 bp, synthetic construct
  source 1..16: mol_type = other DNA
gcatgttggtccctac

SEQ ID NO: 1204 - DNA, 16 bp, synthetic construct
  source 1..16: mol_type = other DNA
ttggacaacactaggg

SEQ ID NO: 1205 - DNA, 16 bp, synthetic construct
  source 1..16: mol_type = other DNA
agcactaagcgtcttg

SEQ ID NO: 1206 - DNA, 16 bp, synthetic construct
  source 1..16: mol_type = other DNA
aagagcactaagcgtc

SEQ ID NO: 1207 - DNA, 16 bp, synthetic construct
  source 1..16: mol_type = other DNA
agcagcaaacgtcctg

SEQ ID NO: 1208 - DNA, 16 bp, synthetic construct
  source 1..16: mol_type = other DNA
cagcagcaaacgtcct

SEQ ID NO: 1209 - DNA, 16 bp, synthetic construct
  source 1..16: mol_type = other DNA
acccagtagcaagttg

SEQ ID NO: 1210 - DNA, 16 bp, synthetic construct
  source 1..16: mol_type = other DNA
tcaattacacctgatc

SEQ ID NO: 1211 - DNA, 16 bp, synthetic construct
  source 1..16: mol_type = other DNA
ggacaccttaactgca

SEQ ID NO: 1212 - DNA, 16 bp, synthetic construct
  source 1..16: mol_type = other DNA
ccctactgatgatctg

SEQ ID NO: 1213 - DNA, 16 bp, synthetic construct
  source 1..16: mol_type = other DNA
gtacctaagtcatcag

SEQ ID NO: 1214 - DNA, 16 bp, synthetic construct
  source 1..16: mol_type = other DNA
ggaagtacctaagtca

SEQ ID NO: 1215 - DNA, 16 bp, synthetic construct
  source 1..16: mol_type = other DNA
gactaactacaggagt

SEQ ID NO: 1216 - DNA, 16 bp, synthetic construct
  source 1..16: mol_type = other DNA
tgactaactacaggag

SEQ ID NO: 1217 - DNA, 16 bp, synthetic construct
  source 1..16: mol_type = other DNA
gttgactaactacagg

SEQ ID NO: 1218 - DNA, 16 bp, synthetic construct
  source 1..16: mol_type = other DNA
ggatgcacaacttgat

SEQ ID NO: 1219 - DNA, 16 bp, synthetic construct
  source 1..16: mol_type = other DNA
agcaatccaagcgtgc

SEQ ID NO: 1220 - DNA, 16 bp, synthetic construct
  source 1..16: mol_type = other DNA
aagcaatccaagcgtg

SEQ ID NO: 1221 - DNA, 16 bp, synthetic construct
  source 1..16: mol_type = other DNA
gcaatagccgaaacat

SEQ ID NO: 1222 - DNA, 16 bp, synthetic construct
  source 1..16: mol_type = other DNA
gtatatcagaccctca

SEQ ID NO: 1223 - DNA, 16 bp, synthetic construct
  source 1..16: mol_type = other DNA
tgtatatcagaccctc

SEQ ID NO: 1224 - DNA, 16 bp, synthetic construct
  source 1..16: mol_type = other DNA
gcttaattcttcggtg

SEQ ID NO: 1225 - DNA, 16 bp, synthetic construct
  source 1..16: mol_type = other DNA
ggcttaattcttcggt

SEQ ID NO: 1226 - DNA, 16 bp, synthetic construct
  source 1..16: mol_type = other DNA
gggcttaattcttcgg

SEQ ID NO: 1227 - DNA, 16 bp, synthetic construct
  source 1..16: mol_type = other DNA
gcaatgtccaatgacc

SEQ ID NO: 1228 - DNA, 16 bp, synthetic construct
  source 1..16: mol_type = other DNA
gtgcaatgtccaatga

SEQ ID NO: 1229 - DNA, 16 bp, synthetic construct
  source 1..16: mol_type = other DNA
cctaagtcatcggaga

SEQ ID NO: 1230 - DNA, 16 bp, synthetic construct
  source 1..16: mol_type = other DNA
acctaagtcatcggag

SEQ ID NO: 1231 - DNA, 16 bp, synthetic construct
  source 1..16: mol_type = other DNA
tacctaagtcatcgga

SEQ ID NO: 1232 - DNA, 16 bp, synthetic construct
  source 1..16: mol_type = other DNA
gtacctaagtcatcgg

SEQ ID NO: 1233 - DNA, 16 bp, synthetic construct
  source 1..16: mol_type = other DNA
agtacctaagtcatcg

SEQ ID NO: 1234 - DNA, 16 bp, synthetic construct
  source 1..16: mol_type = other DNA
ggaagtacctaagtca

SEQ ID NO: 1235 - DNA, 16 bp, synthetic construct
  source 1..16: mol_type = other DNA
gaccctgtaattagtc

SEQ ID NO: 1236 - DNA, 16 bp, synthetic construct
  source 1..16: mol_type = other DNA
gttcacatagagtatc

SEQ ID NO: 1237 - DNA, 16 bp, synthetic construct
  source 1..16: mol_type = other DNA
gcatacactcccaata

SEQ ID NO: 1238 - DNA, 16 bp, synthetic construct
  source 1..16: mol_type = other DNA
agtctatccaatcatg

SEQ ID NO: 1239 - DNA, 16 bp, synthetic construct
  source 1..16: mol_type = other DNA
agtgacctacttatcc

SEQ ID NO: 1240 - DNA, 16 bp, synthetic construct
  source 1..16: mol_type = other DNA
gttagctcaccaacac

SEQ ID NO: 1241 - DNA, 16 bp, synthetic construct
  source 1..16: mol_type = other DNA
tgttagctcaccaaca

SEQ ID NO: 1242 - DNA, 16 bp, synthetic construct
  source 1..16: mol_type = other DNA
ttgttagctcaccaac

SEQ ID NO: 1243 - DNA, 16 bp, synthetic construct
  source 1..16: mol_type = other DNA
ggttcatcctggtcac

SEQ ID NO: 1244 - DNA, 16 bp, synthetic construct
  source 1..16: mol_type = other DNA
tactaagacccacaac

SEQ ID NO: 1245 - DNA, 16 bp, synthetic construct
  source 1..16: mol_type = other DNA
ccttactaagacccac

SEQ ID NO: 1246 - DNA, 16 bp, synthetic construct
  source 1..16: mol_type = other DNA
gccatcctataactac

SEQ ID NO: 1247 - DNA, 16 bp, synthetic construct
  source 1..16: mol_type = other DNA
taagccatcctataac

SEQ ID NO: 1248 - DNA, 16 bp, synthetic construct
  source 1..16: mol_type = other DNA
gccctaatcaagtaga

SEQ ID NO: 1249 - DNA, 16 bp, synthetic construct
  source 1..16: mol_type = other DNA
agccctaatcaagtag

SEQ ID NO: 1250 - DNA, 16 bp, synthetic construct
  source 1..16: mol_type = other DNA
gaatctcttatgggta

SEQ ID NO: 1251 - DNA, 16 bp, synthetic construct
  source 1..16: mol_type = other DNA
taactctctagtacac

SEQ ID NO: 1252 - DNA, 16 bp, synthetic construct
  source 1..16: mol_type = other DNA
cataactctctagtac

SEQ ID NO: 1253 - DNA, 16 bp, synthetic construct
  source 1..16: mol_type = other DNA
gacacctgatgtacac

SEQ ID NO: 1254 - DNA, 16 bp, synthetic construct
  source 1..16: mol_type = other DNA
ggacacctgatgtaca

SEQ ID NO: 1255 - DNA, 16 bp, synthetic construct
  source 1..16: mol_type = other DNA
aggacacctgatgtac

SEQ ID NO: 1256 - DNA, 16 bp, synthetic construct
  source 1..16: mol_type = other DNA
gacatgccctatgaca

SEQ ID NO: 1257 - DNA, 16 bp, synthetic construct
  source 1..16: mol_type = other DNA
tctatcagaggaaccc

SEQ ID NO: 1258 - DNA, 16 bp, synthetic construct
  source 1..16: mol_type = other DNA
tattgtcaggctactc

SEQ ID NO: 1259 - DNA, 16 bp, synthetic construct
  source 1..16: mol_type = other DNA
gttacatcaacccatc

SEQ ID NO: 1260 - DNA, 16 bp, synthetic construct
  source 1..16: mol_type = other DNA
gccaaaccctagtctg

SEQ ID NO: 1261 - DNA, 16 bp, synthetic construct
  source 1..16: mol_type = other DNA
ggcttaatccctgaac

SEQ ID NO: 1262 - DNA, 16 bp, synthetic construct
  source 1..16: mol_type = other DNA
gatcccaatttaatcc

SEQ ID NO: 1263 - DNA, 16 bp, synthetic construct
  source 1..16: mol_type = other DNA
ttgatgaggttagatc

SEQ ID NO: 1264 - DNA, 16 bp, synthetic construct
  source 1..16: mol_type = other DNA
tgatacatgagtacga

SEQ ID NO: 1265 - DNA, 16 bp, synthetic construct
  source 1..16: mol_type = other DNA
ctgatacatgagtacg

SEQ ID NO: 1266 - DNA, 16 bp, synthetic construct
  source 1..16: mol_type = other DNA
gtaactcagcctatgc

SEQ ID NO: 1267 - DNA, 16 bp, synthetic construct
  source 1..16: mol_type = other DNA
atcttcattgtgggcc

SEQ ID NO: 1268 - DNA, 16 bp, synthetic construct
  source 1..16: mol_type = other DNA
ggatcagccaatttgc

SEQ ID NO: 1269 - DNA, 16 bp, synthetic construct
  source 1..16: mol_type = other DNA
gaaccagcctacagtt

SEQ ID NO: 1270 - DNA, 16 bp, synthetic construct
  source 1..16: mol_type = other DNA
ttgagaaccagcctac

SEQ ID NO: 1271 - DNA, 16 bp, synthetic construct
  source 1..16: mol_type = other DNA
tgattccctgataacc

SEQ ID NO: 1272 - DNA, 16 bp, synthetic construct
  source 1..16: mol_type = other DNA
tgcttagacataatcc

SEQ ID NO: 1273 - DNA, 16 bp, synthetic construct
  source 1..16: mol_type = other DNA
ggttgaagatgcttag

SEQ ID NO: 1274 - DNA, 16 bp, synthetic construct
  source 1..16: mol_type = other DNA
gcatgacgcaatataa

SEQ ID NO: 1275 - DNA, 16 bp, synthetic construct
  source 1..16: mol_type = other DNA
aagcatgacgcaatat

SEQ ID NO: 1276 - DNA, 16 bp, synthetic construct
  source 1..16: mol_type = other DNA
ggattactaaattggg

SEQ ID NO: 1277 - DNA, 16 bp, synthetic construct
  source 1..16: mol_type = other DNA
ctagtcagctcagata

SEQ ID NO: 1278 - DNA, 16 bp, synthetic construct
  source 1..16: mol_type = other DNA
gtttgacataaccagt

SEQ ID NO: 1279 - DNA, 16 bp, synthetic construct
  source 1..16: mol_type = other DNA
gatccgtaaagcatgg

SEQ ID NO: 1280 - DNA, 16 bp, synthetic construct
  source 1..16: mol_type = other DNA
gtcttgccagtcagct

SEQ ID NO: 1281 - DNA, 16 bp, synthetic construct
  source 1..16: mol_type = other DNA
ggattgccaactgtga

SEQ ID NO: 1282 - DNA, 16 bp, synthetic construct
  source 1..16: mol_type = other DNA
ggcagcaataaggttc

SEQ ID NO: 1283 - DNA, 16 bp, synthetic construct
  source 1..16: mol_type = other DNA
ggtcaagctcctctac

SEQ ID NO: 1284 - DNA, 16 bp, synthetic construct
  source 1..16: mol_type = other DNA
cggtcaagctcctcta

SEQ ID NO: 1285 - DNA, 16 bp, synthetic construct
  source 1..16: mol_type = other DNA
caatggcatcgctggt

SEQ ID NO: 1286 - DNA, 16 bp, synthetic construct
  source 1..16: mol_type = other DNA
acctgatatagtcacc

SEQ ID NO: 1287 - DNA, 16 bp, synthetic construct
  source 1..16: mol_type = other DNA
gctacctgatatagtc

SEQ ID NO: 1288 - DNA, 16 bp, synthetic construct
  source 1..16: mol_type = other DNA
ggctacctgatatagt

SEQ ID NO: 1289 - DNA, 16 bp, synthetic construct
  source 1..16: mol_type = other DNA
ttactgaatacgggcc

SEQ ID NO: 1290 - DNA, 16 bp, synthetic construct
  source 1..16: mol_type = other DNA
tttactgaatacgggc

SEQ ID NO: 1291 - DNA, 16 bp, synthetic construct
  source 1..16: mol_type = other DNA
gatttactgaatacgg

SEQ ID NO: 1292 - DNA, 16 bp, synthetic construct
  source 1..16: mol_type = other DNA
gtgataatccctcagc

SEQ ID NO: 1293 - DNA, 16 bp, synthetic construct
  source 1..16: mol_type = other DNA
gacaagctcactaagg

SEQ ID NO: 1294 - DNA, 16 bp, synthetic construct
  source 1..16: mol_type = other DNA
gctaacacataagggt

SEQ ID NO: 1295 - DNA, 16 bp, synthetic construct
  source 1..16: mol_type = other DNA
gtgtactcaactccac

SEQ ID NO: 1296 - DNA, 16 bp, synthetic construct
  source 1..16: mol_type = other DNA
ttatgggcagtcagtc

SEQ ID NO: 1297 - DNA, 16 bp, synthetic construct
  source 1..16: mol_type = other DNA
gtattatgggcagtca

SEQ ID NO: 1298 - DNA, 16 bp, synthetic construct
  source 1..16: mol_type = other DNA
tgtattatgggcagtc

SEQ ID NO: 1299 - DNA, 16 bp, synthetic construct
  source 1..16: mol_type = other DNA
cttcttagcataagcg

SEQ ID NO: 1300 - DNA, 16 bp, synthetic construct
  source 1..16: mol_type = other DNA
atgatagtccctctgg

SEQ ID NO: 1301 - DNA, 16 bp, synthetic construct
  source 1..16: mol_type = other DNA
aacatgatagtccctc

SEQ ID NO: 1302 - DNA, 16 bp, synthetic construct
  source 1..16: mol_type = other DNA
gtaacatgatagtccc

SEQ ID NO: 1303 - DNA, 16 bp, synthetic construct
  source 1..16: mol_type = other DNA
agtaacatgatagtcc

SEQ ID NO: 1304 - DNA, 16 bp, synthetic construct
  source 1..16: mol_type = other DNA
tttggtaaactgggcc

SEQ ID NO: 1305 - DNA, 16 bp, synthetic construct
  source 1..16: mol_type = other DNA
gtaactacatcaggta

SEQ ID NO: 1306 - DNA, 16 bp, synthetic construct
  source 1..16: mol_type = other DNA
gtccaagttactgatc

SEQ ID NO: 1307 - DNA, 16 bp, synthetic construct
  source 1..16: mol_type = other DNA
gcaattaggtagagtt

SEQ ID NO: 1308 - DNA, 16 bp, synthetic construct
  source 1..16: mol_type = other DNA
ccggcaattaggtaga

SEQ ID NO: 1309 - DNA, 16 bp, synthetic construct
  source 1..16: mol_type = other DNA
ctttatccaaagccgg

SEQ ID NO: 1310 - DNA, 16 bp, synthetic construct
  source 1..16: mol_type = other DNA
tctttatccaaagccg

SEQ ID NO: 1311 - DNA, 16 bp, synthetic construct
  source 1..16: mol_type = other DNA
actagattgtgtatgc

SEQ ID NO: 1312 - DNA, 16 bp, synthetic construct
  source 1..16: mol_type = other DNA
gacctttactagattg

SEQ ID NO: 1313 - DNA, 16 bp, synthetic construct
  source 1..16: mol_type = other DNA
gtgacctttactagat

SEQ ID NO: 1314 - DNA, 16 bp, synthetic construct
  source 1..16: mol_type = other DNA
aatgtatagggcttgc

SEQ ID NO: 1315 - DNA, 16 bp, synthetic construct
  source 1..16: mol_type = other DNA
gtcccataacccatgc

SEQ ID NO: 1316 - DNA, 16 bp, synthetic construct
  source 1..16: mol_type = other DNA
agtcccataacccatg

SEQ ID NO: 1317 - DNA, 16 bp, synthetic construct
  source 1..16: mol_type = other DNA
atgaagtcccataacc

SEQ ID NO: 1318 - DNA, 16 bp, synthetic construct
  source 1..16: mol_type = other DNA
caatcaggctctaagc

SEQ ID NO: 1319 - DNA, 16 bp, synthetic construct
  source 1..16: mol_type = other DNA
gtattaccagccatca

SEQ ID NO: 1320 - DNA, 16 bp, synthetic construct
  source 1..16: mol_type = other DNA
caagctacaagattgc

SEQ ID NO: 1321 - DNA, 16 bp, synthetic construct
  source 1..16: mol_type = other DNA
gtcctatgataccaac

SEQ ID NO: 1322 - DNA, 16 bp, synthetic construct
  source 1..16: mol_type = other DNA
gagtcctatgatacca

SEQ ID NO: 1323 - DNA, 16 bp, synthetic construct
  source 1..16: mol_type = other DNA
agagtcctatgatacc

SEQ ID NO: 1324 - DNA, 16 bp, synthetic construct
  source 1..16: mol_type = other DNA
aagagtcctatgatac

SEQ ID NO: 1325 - DNA, 16 bp, synthetic construct
  source 1..16: mol_type = other DNA
cttacagggtggacat

SEQ ID NO: 1326 - DNA, 16 bp, synthetic construct
  source 1..16: mol_type = other DNA
atcttacagggtggac

SEQ ID NO: 1327 - DNA, 16 bp, synthetic construct
  source 1..16: mol_type = other DNA
gaatagcctagctctg

SEQ ID NO: 1328 - DNA, 16 bp, synthetic construct
  source 1..16: mol_type = other DNA
ggaatagcctagctct

SEQ ID NO: 1329 - DNA, 16 bp, synthetic construct
  source 1..16: mol_type = other DNA
gcctggaccgtgatca

SEQ ID NO: 1330 - DNA, 16 bp, synthetic construct
  source 1..16: mol_type = other DNA
ctctagttgtgaagtg

SEQ ID NO: 1331 - DNA, 16 bp, synthetic construct
  source 1..16: mol_type = other DNA
taccagtacttacagc

SEQ ID NO: 1332 - DNA, 16 bp, synthetic construct
  source 1..16: mol_type = other DNA
aagctccaacgttaac

SEQ ID NO: 1333 - DNA, 16 bp, synthetic construct
  source 1..16: mol_type = other DNA
gaagctccaacgttaa

SEQ ID NO: 1334 - DNA, 16 bp, synthetic construct
  source 1..16: mol_type = other DNA
taggaggttagttaac

SEQ ID NO: 1335 - DNA, 16 bp, synthetic construct
  source 1..16: mol_type = other DNA
ttgtaggaggttagtt

SEQ ID NO: 1336 - DNA, 16 bp, synthetic construct
  source 1..16: mol_type = other DNA
attgtaggaggttagt

SEQ ID NO: 1337 - DNA, 16 bp, synthetic construct
  source 1..16: mol_type = other DNA
tgattgtaggaggtta

SEQ ID NO: 1338 - DNA, 16 bp, synthetic construct
  source 1..16: mol_type = other DNA
gtgattgtaggaggtt

SEQ ID NO: 1339 - DNA, 16 bp, synthetic construct
  source 1..16: mol_type = other DNA
ttaggtaagctgtgac

SEQ ID NO: 1340 - DNA, 16 bp, synthetic construct
  source 1..16: mol_type = other DNA
ccctcagcataactac

SEQ ID NO: 1341 - DNA, 16 bp, synthetic construct
  source 1..16: mol_type = other DNA
cgacaacttgcctcca

SEQ ID NO: 1342 - DNA, 16 bp, synthetic construct
  source 1..16: mol_type = other DNA
accgacaacttgcctc

SEQ ID NO: 1343 - DNA, 16 bp, synthetic construct
  source 1..16: mol_type = other DNA
caccgacaacttgcct

SEQ ID NO: 1344 - DNA, 16 bp, synthetic construct
  source 1..16: mol_type = other DNA
acaccgacaacttgcc

SEQ ID NO: 1345 - DNA, 16 bp, synthetic construct
  source 1..16: mol_type = other DNA
aacaccgacaacttgc

SEQ ID NO: 1346 - DNA, 16 bp, synthetic construct
  source 1..16: mol_type = other DNA
tagcaaccatatagct

SEQ ID NO: 1347 - DNA, 16 bp, synthetic construct
  source 1..16: mol_type = other DNA
ttagcaaccatatagc

SEQ ID NO: 1348 - DNA, 16 bp, synthetic construct
  source 1..16: mol_type = other DNA
cattagttgtgttagc

SEQ ID NO: 1349 - DNA, 16 bp, synthetic construct
  source 1..16: mol_type = other DNA
ggagacctaacagttc

SEQ ID NO: 1350 - DNA, 16 bp, synthetic construct
  source 1..16: mol_type = other DNA
tgggacatttagggtc

SEQ ID NO: 1351 - DNA, 16 bp, synthetic construct
  source 1..16: mol_type = other DNA
gtcaactaagcactgg

SEQ ID NO: 1352 - DNA, 16 bp, synthetic construct
  source 1..16: mol_type = other DNA
agacacagcatcgatc

SEQ ID NO: 1353 - DNA, 16 bp, synthetic construct
  source 1..16: mol_type = other DNA
tagacacagcatcgat

SEQ ID NO: 1354 - DNA, 16 bp, synthetic construct
  source 1..16: mol_type = other DNA
ttagacacagcatcga

SEQ ID NO: 1355 - DNA, 16 bp, synthetic construct
  source 1..16: mol_type = other DNA
gttagacacagcatcg

SEQ ID NO: 1356 - DNA, 16 bp, synthetic construct
  source 1..16: mol_type = other DNA
ggttagacacagcatc

SEQ ID NO: 1357 - DNA, 16 bp, synthetic construct
  source 1..16: mol_type = other DNA
gcagcctacaagacta

SEQ ID NO: 1358 - DNA, 16 bp, synthetic construct
  source 1..16: mol_type = other DNA
tagttataccacagcc

SEQ ID NO: 1359 - DNA, 16 bp, synthetic construct
  source 1..16: mol_type = other DNA
gtagttataccacagc

SEQ ID NO: 1360 - DNA, 16 bp, synthetic construct
  source 1..16: mol_type = other DNA
tgcgaatgtatgagtg

SEQ ID NO: 1361 - DNA, 16 bp, synthetic construct
  source 1..16: mol_type = other DNA
cataggtgttgtgcga

SEQ ID NO: 1362 - DNA, 16 bp, synthetic construct
  source 1..16: mol_type = other DNA
gaccttagcactgtcc

SEQ ID NO: 1363 - DNA, 16 bp, synthetic construct
  source 1..16: mol_type = other DNA
gtcaatgcaacctact

SEQ ID NO: 1364 - DNA, 16 bp, synthetic construct
  source 1..16: mol_type = other DNA
gccaggtcaatgcaac

SEQ ID NO: 1365 - DNA, 16 bp, synthetic construct
  source 1..16: mol_type = other DNA
agcccatccatagtga

SEQ ID NO: 1366 - DNA, 16 bp, synthetic construct
  source 1..16: mol_type = other DNA
acagcccatccatagt

SEQ ID NO: 1367 - DNA, 16 bp, synthetic construct
  source 1..16: mol_type = other DNA
ggtagactgttgaatg

SEQ ID NO: 1368 - DNA, 16 bp, synthetic construct
  source 1..16: mol_type = other DNA
ctaggtagactgttga

SEQ ID NO: 1369 - DNA, 16 bp, synthetic construct
  source 1..16: mol_type = other DNA
tctaggtagactgttg

SEQ ID NO: 1370 - DNA, 16 bp, synthetic construct
  source 1..16: mol_type = other DNA
ggtacaatatctctcc

SEQ ID NO: 1371 - DNA, 16 bp, synthetic construct
  source 1..16: mol_type = other DNA
tcagtctatcaggtac

SEQ ID NO: 1372 - DNA, 16 bp, synthetic construct
  source 1..16: mol_type = other DNA
gtaggttcacagctag

SEQ ID NO: 1373 - DNA, 16 bp, synthetic construct
  source 1..16: mol_type = other DNA
gagtaggttcacagct

SEQ ID NO: 1374 - DNA, 16 bp, synthetic construct
  source 1..16: mol_type = other DNA
ggagtaggttcacagc

SEQ ID NO: 1375 - DNA, 16 bp, synthetic construct
  source 1..16: mol_type = other DNA
tttggcaacccattgc

SEQ ID NO: 1376 - DNA, 16 bp, synthetic construct
  source 1..16: mol_type = other DNA
gttggcatactttggc

SEQ ID NO: 1377 - DNA, 16 bp, synthetic construct
  source 1..16: mol_type = other DNA
gagagtcagtgttacc

SEQ ID NO: 1378 - DNA, 16 bp, synthetic construct
  source 1..16: mol_type = other DNA
tcgggttggtggtgag

SEQ ID NO: 1379 - DNA, 16 bp, synthetic construct
  source 1..16: mol_type = other DNA
gtcaacactaacttgc

SEQ ID NO: 1380 - DNA, 16 bp, synthetic construct
  source 1..16: mol_type = other DNA
ggtcaacactaacttg

SEQ ID NO: 1381 - DNA, 16 bp, synthetic construct
  source 1..16: mol_type = other DNA
atggaagatcataccc

SEQ ID NO: 1382 - DNA, 16 bp, synthetic construct
  source 1..16: mol_type = other DNA
ggcacaacatactgtc

SEQ ID NO: 1383 - DNA, 16 bp, synthetic construct
  source 1..16: mol_type = other DNA
taggactatgcacaag

SEQ ID NO: 1384 - DNA, 16 bp, synthetic construct
  source 1..16: mol_type = other DNA
gaacttagcacactag

SEQ ID NO: 1385 - DNA, 16 bp, synthetic construct
  source 1..16: mol_type = other DNA
ggaacttagcacacta

SEQ ID NO: 1386 - DNA, 16 bp, synthetic construct
  source 1..16: mol_type = other DNA
taggaacttagcacac

SEQ ID NO: 1387 - DNA, 16 bp, synthetic construct
  source 1..16: mol_type = other DNA
gcaacctgatgagtag

SEQ ID NO: 1388 - DNA, 16 bp, synthetic construct
  source 1..16: mol_type = other DNA
tagcaacctgatgagt

SEQ ID NO: 1389 - DNA, 16 bp, synthetic construct
  source 1..16: mol_type = other DNA
gtagcaacctgatgag

SEQ ID NO: 1390 - DNA, 16 bp, synthetic construct
  source 1..16: mol_type = other DNA
ttaagcagtagcaacc

SEQ ID NO: 1391 - DNA, 16 bp, synthetic construct
  source 1..16: mol_type = other DNA
aaccttaagcagtagc

SEQ ID NO: 1392 - DNA, 16 bp, synthetic construct
  source 1..16: mol_type = other DNA
gaaccttaagcagtag

SEQ ID NO: 1393 - DNA, 16 bp, synthetic construct
  source 1..16: mol_type = other DNA
ggaaccttaagcagta

SEQ ID NO: 1394 - DNA, 16 bp, synthetic construct
  source 1..16: mol_type = other DNA
gggaaccttaagcagt

SEQ ID NO: 1395 - DNA, 16 bp, synthetic construct
  source 1..16: mol_type = other DNA
cttcgatctcagggct

SEQ ID NO: 1396 - DNA, 16 bp, synthetic construct
  source 1..16: mol_type = other DNA
gtacttggacttcacc

SEQ ID NO: 1397 - DNA, 16 bp, synthetic construct
  source 1..16: mol_type = other DNA
cccaaggttagagtac

SEQ ID NO: 1398 - DNA, 16 bp, synthetic construct
  source 1..16: mol_type = other DNA
cagtaaggcatcgttt

SEQ ID NO: 1399 - DNA, 16 bp, synthetic construct
  source 1..16: mol_type = other DNA
ccagtaaggcatcgtt

SEQ ID NO: 1400 - DNA, 16 bp, synthetic construct
  source 1..16: mol_type = other DNA
tccagtaaggcatcgt

SEQ ID NO: 1401 - DNA, 16 bp, synthetic construct
  source 1..16: mol_type = other DNA
accaagagttgagtac

SEQ ID NO: 1402 - DNA, 16 bp, synthetic construct
  source 1..16: mol_type = other DNA
tagcactacaatatcc

SEQ ID NO: 1403 - DNA, 16 bp, synthetic construct
  source 1..16: mol_type = other DNA
ctgagttacggttagc

SEQ ID NO: 1404 - DNA, 16 bp, synthetic construct
  source 1..16: mol_type = other DNA
tctgagttacggttag

SEQ ID NO: 1405 - DNA, 16 bp, synthetic construct
  source 1..16: mol_type = other DNA
atctgagttacggtta

SEQ ID NO: 1406 - DNA, 16 bp, synthetic construct
  source 1..16: mol_type = other DNA
tatctgagttacggtt

SEQ ID NO: 1407 - DNA, 16 bp, synthetic construct
  source 1..16: mol_type = other DNA
atatctgagttacggt

SEQ ID NO: 1408 - DNA, 16 bp, synthetic construct
  source 1..16: mol_type = other DNA
gtggagtgattgatac

SEQ ID NO: 1409 - DNA, 16 bp, synthetic construct
  source 1..16: mol_type = other DNA
cgtggagtgattgata

SEQ ID NO: 1410 - DNA, 16 bp, synthetic construct
  source 1..16: mol_type = other DNA
gcagcttagatgatac

SEQ ID NO: 1411 - DNA, 16 bp, synthetic construct
  source 1..16: mol_type = other DNA
ctatggacttactggt

SEQ ID NO: 1412 - DNA, 16 bp, synthetic construct
  source 1..16: mol_type = other DNA
gaactatggacttact

SEQ ID NO: 1413 - DNA, 16 bp, synthetic construct
  source 1..16: mol_type = other DNA
ggaactatggacttac

SEQ ID NO: 1414 - DNA, 16 bp, synthetic construct
  source 1..16: mol_type = other DNA
gggaactatggactta

SEQ ID NO: 1415 - DNA, 16 bp, synthetic construct
  source 1..16: mol_type = other DNA
cgtcaatgtgaagatt

SEQ ID NO: 1416 - DNA, 16 bp, synthetic construct
  source 1..16: mol_type = other DNA
gcgtcaatgtgaagat

SEQ ID NO: 1417 - DNA, 16 bp, synthetic construct
  source 1..16: mol_type = other DNA
gaaacacggatggttc

SEQ ID NO: 1418 - DNA, 16 bp, synthetic construct
  source 1..16: mol_type = other DNA
gcacaggtctcatatg

SEQ ID NO: 1419 - DNA, 16 bp, synthetic construct
  source 1..16: mol_type = other DNA
atgttaggttggagtc

SEQ ID NO: 1420 - DNA, 16 bp, synthetic construct
  source 1..16: mol_type = other DNA
gttgacacttatctgg

SEQ ID NO: 1421 - DNA, 16 bp, synthetic construct
  source 1..16: mol_type = other DNA
ggtgttcaaagttgac

SEQ ID NO: 1422 - DNA, 16 bp, synthetic construct
  source 1..16: mol_type = other DNA
tgggtaactattgagg

SEQ ID NO: 1423 - DNA, 16 bp, synthetic construct
  source 1..16: mol_type = other DNA
ctggattactatcagg

SEQ ID NO: 1424 - DNA, 16 bp, synthetic construct
  source 1..16: mol_type = other DNA
gctggattactatcag

SEQ ID NO: 1425 - DNA, 16 bp, synthetic construct
  source 1..16: mol_type = other DNA
ctgctggattactatc

SEQ ID NO: 1426 - DNA, 16 bp, synthetic construct
  source 1..16: mol_type = other DNA
gttgaccctattgatt

SEQ ID NO: 1427 - DNA, 16 bp, synthetic construct
  source 1..16: mol_type = other DNA
tgttgaccctattgat

SEQ ID NO: 1428 - DNA, 16 bp, synthetic construct
  source 1..16: mol_type = other DNA
ctgttgaccctattga

SEQ ID NO: 1429 - DNA, 16 bp, synthetic construct
  source 1..16: mol_type = other DNA
gctgttgaccctattg

SEQ ID NO: 1430 - DNA, 16 bp, synthetic construct
  source 1..16: mol_type = other DNA
gtgctgttgaccctat

SEQ ID NO: 1431 - DNA, 16 bp, synthetic construct
  source 1..16: mol_type = other DNA
tgtgctgttgacccta

SEQ ID NO: 1432 - DNA, 16 bp, synthetic construct
  source 1..16: mol_type = other DNA
gtgtgctgttgaccct

SEQ ID NO: 1433 - DNA, 16 bp, synthetic construct
  source 1..16: mol_type = other DNA
atagggcttgaatcag

SEQ ID NO: 1434 - DNA, 16 bp, synthetic construct
  source 1..16: mol_type = other DNA
taactgggatagggct

SEQ ID NO: 1435 - DNA, 16 bp, synthetic construct
  source 1..16: mol_type = other DNA
gctgaaccttgtgata

SEQ ID NO: 1436 - DNA, 16 bp, synthetic construct
  source 1..16: mol_type = other DNA
gtgctgaaccttgtga

SEQ ID NO: 1437 - DNA, 16 bp, synthetic construct
  source 1..16: mol_type = other DNA
gactgttgaactggcc

SEQ ID NO: 1438 - DNA, 16 bp, synthetic construct
  source 1..16: mol_type = other DNA
ggactgttgaactggc

SEQ ID NO: 1439 - DNA, 16 bp, synthetic construct
  source 1..16: mol_type = other DNA
gggactgttgaactgg

SEQ ID NO: 1440 - DNA, 16 bp, synthetic construct
  source 1..16: mol_type = other DNA
tagggactgttgaact

SEQ ID NO: 1441 - DNA, 16 bp, synthetic construct
  source 1..16: mol_type = other DNA
gtagggactgttgaac

SEQ ID NO: 1442 - DNA, 16 bp, synthetic construct
  source 1..16: mol_type = other DNA
gcagttagtagtatct

SEQ ID NO: 1443 - DNA, 16 bp, synthetic construct
  source 1..16: mol_type = other DNA
agcagttagtagtatc

SEQ ID NO: 1444 - DNA, 16 bp, synthetic construct
  source 1..16: mol_type = other DNA
ggaaactagccttagg

SEQ ID NO: 1445 - DNA, 16 bp, synthetic construct
  source 1..16: mol_type = other DNA
gttggtatagagcatg

SEQ ID NO: 1446 - DNA, 16 bp, synthetic construct
  source 1..16: mol_type = other DNA
agttggtatagagcat

SEQ ID NO: 1447 - DNA, 16 bp, synthetic construct
  source 1..16: mol_type = other DNA
taagttggtatagagc

SEQ ID NO: 1448 - DNA, 16 bp, synthetic construct
  source 1..16: mol_type = other DNA
ggttatcagtaggctt

SEQ ID NO: 1449 - DNA, 16 bp, synthetic construct
  source 1..16: mol_type = other DNA
gggttatcagtaggct

SEQ ID NO: 1450 - DNA, 16 bp, synthetic construct
  source 1..16: mol_type = other DNA
tgggttatcagtaggc

SEQ ID NO: 1451 - DNA, 16 bp, synthetic construct
  source 1..16: mol_type = other DNA
cgttcaaagggcatgg

SEQ ID NO: 1452 - DNA, 16 bp, synthetic construct
  source 1..16: mol_type = other DNA
gctaggacacagacgc

SEQ ID NO: 1453 - DNA, 16 bp, synthetic construct
  source 1..16: mol_type = other DNA
gtagaccacatcactt

SEQ ID NO: 1454 - DNA, 16 bp, synthetic construct
  source 1..16: mol_type = other DNA
acggtcctcccaaatc

SEQ ID NO: 1455 - DNA, 16 bp, synthetic construct
  source 1..16: mol_type = other DNA
cacggtcctcccaaat

SEQ ID NO: 1456 - DNA, 16 bp, synthetic construct
  source 1..16: mol_type = other DNA
gtccacccttagaaga

SEQ ID NO: 1457 - DNA, 16 bp, synthetic construct
  source 1..16: mol_type = other DNA
tgtccacccttagaag

SEQ ID NO: 1458 - DNA, 16 bp, synthetic construct
  source 1..16: mol_type = other DNA
gatgtccacccttaga

SEQ ID NO: 1459 - DNA, 16 bp, synthetic construct
  source 1..16: mol_type = other DNA
tgatgtccacccttag

SEQ ID NO: 1460 - DNA, 16 bp, synthetic construct
  source 1..16: mol_type = other DNA
gctcataatgatgtcc

SEQ ID NO: 1461 - DNA, 16 bp, synthetic construct
  source 1..16: mol_type = other DNA
gtattagatggaatcc

SEQ ID NO: 1462 - DNA, 16 bp, synthetic construct
  source 1..16: mol_type = other DNA
cttagttggtagtatc

SEQ ID NO: 1463 - DNA, 16 bp, synthetic construct
  source 1..16: mol_type = other DNA
ggtcctagtaaacact

SEQ ID NO: 1464 - DNA, 16 bp, synthetic construct
  source 1..16: mol_type = other DNA
gctcatagaggtctta

SEQ ID NO: 1465 - DNA, 16 bp, synthetic construct
  source 1..16: mol_type = other DNA
gtcagtgcaagtaagt

SEQ ID NO: 1466 - DNA, 16 bp, synthetic construct
  source 1..16: mol_type = other DNA
ggcagttcagtcctcc

SEQ ID NO: 1467 - DNA, 16 bp, synthetic construct
  source 1..16: mol_type = other DNA
cttggcagttcagtcc

SEQ ID NO: 1468 - DNA, 16 bp, synthetic construct
  source 1..16: mol_type = other DNA
ctaacctatcctatgg

SEQ ID NO: 1469 - DNA, 16 bp, synthetic construct
  source 1..16: mol_type = other DNA
gctaacctatcctatg

SEQ ID NO: 1470 - DNA, 16 bp, synthetic construct
  source 1..16: mol_type = other DNA
acaagctaacctatcc

SEQ ID NO: 1471 - DNA, 16 bp, synthetic construct
  source 1..16: mol_type = other DNA
tacaagctaacctatc

SEQ ID NO: 1472 - DNA, 16 bp, synthetic construct
  source 1..16: mol_type = other DNA
cgaagacttggttcat

SEQ ID NO: 1473 - DNA, 16 bp, synthetic construct
  source 1..16: mol_type = other DNA
gctttgtggtttgcga

SEQ ID NO: 1474 - DNA, 16 bp, synthetic construct
  source 1..16: mol_type = other DNA
attaaagtaagcccgg

SEQ ID NO: 1475 - DNA, 16 bp, synthetic construct
  source 1..16: mol_type = other DNA
cattaaagtaagcccg

SEQ ID NO: 1476 - DNA, 16 bp, synthetic construct
  source 1..16: mol_type = other DNA
gcattaaagtaagccc

SEQ ID NO: 1477 - DNA, 16 bp, synthetic construct
  source 1..16: mol_type = other DNA
agtattgaactagcct

SEQ ID NO: 1478 - DNA, 16 bp, synthetic construct
  source 1..16: mol_type = other DNA
caagtattgaactagc

SEQ ID NO: 1479 - DNA, 16 bp, synthetic construct
  source 1..16: mol_type = other DNA
cagtacaacctagccc

SEQ ID NO: 1480 - DNA, 16 bp, synthetic construct
  source 1..16: mol_type = other DNA
ccagtacaacctagcc

SEQ ID NO: 1481 - DNA, 16 bp, synthetic construct
  source 1..16: mol_type = other DNA
cccagtacaacctagc

SEQ ID NO: 1482 - DNA, 16 bp, synthetic construct
  source 1..16: mol_type = other DNA
tagtggtggtttacgg

SEQ ID NO: 1483 - DNA, 16 bp, synthetic construct
  source 1..16: mol_type = other DNA
atagtggtggtttacg

SEQ ID NO: 1484 - DNA, 16 bp, synthetic construct
  source 1..16: mol_type = other DNA
tatagtggtggtttac

SEQ ID NO: 1485 - DNA, 16 bp, synthetic construct
  source 1..16: mol_type = other DNA
gtggtagattggattc

SEQ ID NO: 1486 - DNA, 16 bp, synthetic construct
  source 1..16: mol_type = other DNA
gtgtggtagattggat

SEQ ID NO: 1487 - DNA, 16 bp, synthetic construct
  source 1..16: mol_type = other DNA
ttgtgtggtagattgg

SEQ ID NO: 1488 - DNA, 16 bp, synthetic construct
  source 1..16: mol_type = other DNA
cttgggtaaggttcaa

SEQ ID NO: 1489 - DNA, 16 bp, synthetic construct
  source 1..16: mol_type = other DNA
ctcttgggtaaggttc

SEQ ID NO: 1490 - DNA, 16 bp, synthetic construct
  source 1..16: mol_type = other DNA
aggactaatacacgta

SEQ ID NO: 1491 - DNA, 16 bp, synthetic construct
  source 1..16: mol_type = other DNA
ggtcccaatactatcc

SEQ ID NO: 1492 - DNA, 16 bp, synthetic construct
  source 1..16: mol_type = other DNA
gttacctccaagcaat

SEQ ID NO: 1493 - DNA, 16 bp, synthetic construct
  source 1..16: mol_type = other DNA
gttacaccagagcagc

SEQ ID NO: 1494 - DNA, 16 bp, synthetic construct
  source 1..16: mol_type = other DNA
gatgagtgtctaaacc

SEQ ID NO: 1495 - DNA, 16 bp, synthetic construct
  source 1..16: mol_type = other DNA
ggagtagggtcattta

SEQ ID NO: 1496 - DNA, 16 bp, synthetic construct
  source 1..16: mol_type = other DNA
ctagctttatggaacc

SEQ ID NO: 1497 - DNA, 16 bp, synthetic construct
  source 1..16: mol_type = other DNA
ttctcacagcgaaccc

SEQ ID NO: 1498 - DNA, 16 bp, synthetic construct
  source 1..16: mol_type = other DNA
tttctcacagcgaacc

SEQ ID NO: 1499 - DNA, 16 bp, synthetic construct
  source 1..16: mol_type = other DNA
gcctcccatcaatgat

SEQ ID NO: 1500 - DNA, 16 bp, synthetic construct
  source 1..16: mol_type = other DNA
gcatcatacgacattc

SEQ ID NO: 1501 - DNA, 16 bp, synthetic construct
  source 1..16: mol_type = other DNA
gcagattgtagggtac

SEQ ID NO: 1502 - DNA, 16 bp, synthetic construct
  source 1..16: mol_type = other DNA
gttgctacacttgcca

SEQ ID NO: 1503 - DNA, 16 bp, synthetic construct
  source 1..16: mol_type = other DNA
agttgctacacttgcc

SEQ ID NO: 1504 - DNA, 16 bp, synthetic construct
  source 1..16: mol_type = other DNA
cagttgctacacttgc

SEQ ID NO: 1505 - DNA, 16 bp, synthetic construct
  source 1..16: mol_type = other DNA
ccagttgctacacttg

SEQ ID NO: 1506 - DNA, 16 bp, synthetic construct
  source 1..16: mol_type = other DNA
agtcaccctctaattg

SEQ ID NO: 1507 - DNA, 16 bp, synthetic construct
  source 1..16: mol_type = other DNA
gtaagtcaccctctaa

SEQ ID NO: 1508 - DNA, 16 bp, synthetic construct
  source 1..16: mol_type = other DNA
gcagtaagtcaccctc

SEQ ID NO: 1509 - DNA, 16 bp, synthetic construct
  source 1..16: mol_type = other DNA
ttgcaagattccgctt

SEQ ID NO: 1510 - DNA, 16 bp, synthetic construct
  source 1..16: mol_type = other DNA
attgcaagattccgct

SEQ ID NO: 1511 - DNA, 16 bp, synthetic construct
  source 1..16: mol_type = other DNA
tattgcaagattccgc

SEQ ID NO: 1512 - DNA, 16 bp, synthetic construct
  source 1..16: mol_type = other DNA
tgtattagtggcttgc

SEQ ID NO: 1513 - DNA, 16 bp, synthetic construct
  source 1..16: mol_type = other DNA
ctatgtattagtggct

SEQ ID NO: 1514 - DNA, 16 bp, synthetic construct
  source 1..16: mol_type = other DNA
ggtatagcagacactc

SEQ ID NO: 1515 - DNA, 16 bp, synthetic construct
  source 1..16: mol_type = other DNA
gggtctccatcattgt

SEQ ID NO: 1516 - DNA, 16 bp, synthetic construct
  source 1..16: mol_type = other DNA
gcattacatgggtctc

SEQ ID NO: 1517 - DNA, 16 bp, synthetic construct
  source 1..16: mol_type = other DNA
gctaatgggtttgtgc

SEQ ID NO: 1518 - DNA, 16 bp, synthetic construct
  source 1..16: mol_type = other DNA
cggaataaagttgcta

SEQ ID NO: 1519 - DNA, 16 bp, synthetic construct
  source 1..16: mol_type = other DNA
cttagttagaaggtgt

SEQ ID NO: 1520 - DNA, 16 bp, synthetic construct
  source 1..16: mol_type = other DNA
caacttagttagaagg

SEQ ID NO: 1521 - DNA, 16 bp, synthetic construct
  source 1..16: mol_type = other DNA
ggtgtcccaagtaaac

SEQ ID NO: 1522 - DNA, 16 bp, synthetic construct
  source 1..16: mol_type = other DNA
ctcattgacttgcaac

SEQ ID NO: 1523 - DNA, 16 bp, synthetic construct
  source 1..16: mol_type = other DNA
tggagttgtactgaac

SEQ ID NO: 1524 - DNA, 16 bp, synthetic construct
  source 1..16: mol_type = other DNA
ggactggagttgtact

SEQ ID NO: 1525 - DNA, 16 bp, synthetic construct
  source 1..16: mol_type = other DNA
ataattcaacgcagtg

SEQ ID NO: 1526 - DNA, 16 bp, synthetic construct
  source 1..16: mol_type = other DNA
cagaataattcaacgc

SEQ ID NO: 1527 - DNA, 16 bp, synthetic construct
  source 1..16: mol_type = other DNA
gatagtttgcctactc

SEQ ID NO: 1528 - DNA, 16 bp, synthetic construct
  source 1..16: mol_type = other DNA
ggatagtttgcctact

SEQ ID NO: 1529 - DNA, 16 bp, synthetic construct
  source 1..16: mol_type = other DNA
aataggatagtttgcc

SEQ ID NO: 1530 - DNA, 16 bp, synthetic construct
  source 1..16: mol_type = other DNA
gaataggatagtttgc

SEQ ID NO: 1531 - DNA, 16 bp, synthetic construct
  source 1..16: mol_type = other DNA
gttctaaggtgtcaag

SEQ ID NO: 1532 - DNA, 16 bp, synthetic construct
  source 1..16: mol_type = other DNA
gaagttctaaggtgtc

SEQ ID NO: 1533 - DNA, 16 bp, synthetic construct
  source 1..16: mol_type = other DNA
tggacagttacagacc

SEQ ID NO: 1534 - DNA, 16 bp, synthetic construct
  source 1..16: mol_type = other DNA
ctcgtattgaaaggta

SEQ ID NO: 1535 - DNA, 16 bp, synthetic construct
  source 1..16: mol_type = other DNA
tctcgtattgaaaggt

SEQ ID NO: 1536 - DNA, 16 bp, synthetic construct
  source 1..16: mol_type = other DNA
atctcgtattgaaagg

SEQ ID NO: 1537 - DNA, 16 bp, synthetic construct
  source 1..16: mol_type = other DNA
actgctcctgatatag

SEQ ID NO: 1538 - DNA, 16 bp, synthetic construct
  source 1..16: mol_type = other DNA
cccttgcagatgatac

SEQ ID NO: 1539 - DNA, 16 bp, synthetic construct
  source 1..16: mol_type = other DNA
tttagtaaggatcacc

SEQ ID NO: 1540 - DNA, 16 bp, synthetic construct
  source 1..16: mol_type = other DNA
gttaggcatatcatac

SEQ ID NO: 1541 - DNA, 16 bp, synthetic construct
  source 1..16: mol_type = other DNA
ggtgctaataactcct

SEQ ID NO: 1542 - DNA, 16 bp, synthetic construct
  source 1..16: mol_type = other DNA
gtgggtgctaataact

SEQ ID NO: 1543 - DNA, 16 bp, synthetic construct
  source 1..16: mol_type = other DNA
gtgttagtcatgtaca

SEQ ID NO: 1544 - DNA, 16 bp, synthetic construct
  source 1..16: mol_type = other DNA
agtgttagtcatgtac

SEQ ID NO: 1545 - DNA, 16 bp, synthetic construct
  source 1..16: mol_type = other DNA
gaagtttatgtgatcc

SEQ ID NO: 1546 - DNA, 16 bp, synthetic construct
  source 1..16: mol_type = other DNA
ggttagggaatcattc

SEQ ID NO: 1547 - DNA, 16 bp, synthetic construct
  source 1..16: mol_type = other DNA
attattgccctactag

SEQ ID NO: 1548 - DNA, 16 bp, synthetic construct
  source 1..16: mol_type = other DNA
gtgtatccactcaacc

SEQ ID NO: 1549 - DNA, 16 bp, synthetic construct
  source 1..16: mol_type = other DNA
aaatattccctccggc

SEQ ID NO: 1550 - DNA, 16 bp, synthetic construct
  source 1..16: mol_type = other DNA
gtccaccagtagattt

SEQ ID NO: 1551 - DNA, 16 bp, synthetic construct
  source 1..16: mol_type = other DNA
gccagtgttgtctacc

SEQ ID NO: 1552 - DNA, 16 bp, synthetic construct
  source 1..16: mol_type = other DNA
gggagtatgagctgtt

SEQ ID NO: 1553 - DNA, 16 bp, synthetic construct
  source 1..16: mol_type = other DNA
ggcttgtaatacctac

SEQ ID NO: 1554 - DNA, 16 bp, synthetic construct
  source 1..16: mol_type = other DNA
cggcttgtaataccta

SEQ ID NO: 1555 - DNA, 16 bp, synthetic construct
  source 1..16: mol_type = other DNA
ccggcttgtaatacct

SEQ ID NO: 1556 - DNA, 16 bp, synthetic construct
  source 1..16: mol_type = other DNA
ggtctctacactagtt

SEQ ID NO: 1557 - DNA, 16 bp, synthetic construct
  source 1..16: mol_type = other DNA
gacctaagccagatta

SEQ ID NO: 1558 - DNA, 16 bp, synthetic construct
  source 1..16: mol_type = other DNA
gattagaccagaccct

SEQ ID NO: 1559 - DNA, 16 bp, synthetic construct
  source 1..16: mol_type = other DNA
agattagaccagaccc

SEQ ID NO: 1560 - DNA, 16 bp, synthetic construct
  source 1..16: mol_type = other DNA
aggatacttaaccctc

SEQ ID NO: 1561 - DNA, 16 bp, synthetic construct
  source 1..16: mol_type = other DNA
gaggatacttaaccct

SEQ ID NO: 1562 - DNA, 16 bp, synthetic construct
  source 1..16: mol_type = other DNA
ggaggatacttaaccc

SEQ ID NO: 1563 - DNA, 16 bp, synthetic construct
  source 1..16: mol_type = other DNA
gcatcctacatcaacc

SEQ ID NO: 1564 - DNA, 16 bp, synthetic construct
  source 1..16: mol_type = other DNA
ggcatcctacatcaac

SEQ ID NO: 1565 - DNA, 16 bp, synthetic construct
  source 1..16: mol_type = other DNA
acgttgcctctgtgtg

SEQ ID NO: 1566 - DNA, 16 bp, synthetic construct
  source 1..16: mol_type = other DNA
ctgtattggataaacc

SEQ ID NO: 1567 - DNA, 16 bp, synthetic construct
  source 1..16: mol_type = other DNA
ggctatcacactcaga

SEQ ID NO: 1568 - DNA, 16 bp, synthetic construct
  source 1..16: mol_type = other DNA
gtaaggcacccatgag

SEQ ID NO: 1569 - DNA, 16 bp, synthetic construct
  source 1..16: mol_type = other DNA
agtaaggcacccatga

SEQ ID NO: 1570 - DNA, 16 bp, synthetic construct
  source 1..16: mol_type = other DNA
cagtaaggcacccatg

SEQ ID NO: 1571 - DNA, 16 bp, synthetic construct
  source 1..16: mol_type = other DNA
gaccgctcagtaaggc

SEQ ID NO: 1572 - DNA, 16 bp, synthetic construct
  source 1..16: mol_type = other DNA
ggaccgctcagtaagg

SEQ ID NO: 1573 - DNA, 16 bp, synthetic construct
  source 1..16: mol_type = other DNA
gtggaacctttaactg

SEQ ID NO: 1574 - DNA, 16 bp, synthetic construct
  source 1..16: mol_type = other DNA
gtgcaagtagattaca

SEQ ID NO: 1575 - DNA, 16 bp, synthetic construct
  source 1..16: mol_type = other DNA
tgtgcaagtagattac

SEQ ID NO: 1576 - DNA, 16 bp, synthetic construct
  source 1..16: mol_type = other DNA
gccgagtcttcatgtc

SEQ ID NO: 1577 - DNA, 16 bp, synthetic construct
  source 1..16: mol_type = other DNA
tgcagtagactagggt

SEQ ID NO: 1578 - DNA, 16 bp, synthetic construct
  source 1..16: mol_type = other DNA
tgtgcagtagactagg

SEQ ID NO: 1579 - DNA, 16 bp, synthetic construct
  source 1..16: mol_type = other DNA
gttgacattgcttgcc

SEQ ID NO: 1580 - DNA, 16 bp, synthetic construct
  source 1..16: mol_type = other DNA
gtcattactggattag

SEQ ID NO: 1581 - DNA, 16 bp, synthetic construct
  source 1..16: mol_type = other DNA
ggtacagtttggctta

SEQ ID NO: 1582 - DNA, 16 bp, synthetic construct
  source 1..16: mol_type = other DNA
gtgggtagtatgtcat

SEQ ID NO: 1583 - DNA, 16 bp, synthetic construct
  source 1..16: mol_type = other DNA
gtccatatgtagagta

SEQ ID NO: 1584 - DNA, 16 bp, synthetic construct
  source 1..16: mol_type = other DNA
caatgtgtgttgcggg

SEQ ID NO: 1585 - DNA, 16 bp, synthetic construct
  source 1..16: mol_type = other DNA
tcaatgtgtgttgcgg

SEQ ID NO: 1586 - DNA, 16 bp, synthetic construct
  source 1..16: mol_type = other DNA
gtcaatgtgtgttgcg

SEQ ID NO: 1587 - DNA, 16 bp, synthetic construct
  source 1..16: mol_type = other DNA
ggtcaatgtgtgttgc

SEQ ID NO: 1588 - DNA, 16 bp, synthetic construct
  source 1..16: mol_type = other DNA
tcttacgtgtctgaag

SEQ ID NO: 1589 - DNA, 16 bp, synthetic construct
  source 1..16: mol_type = other DNA
ctcttacgtgtctgaa

SEQ ID NO: 1590 - DNA, 16 bp, synthetic construct
  source 1..16: mol_type = other DNA
actcttacgtgtctga

SEQ ID NO: 1591 - DNA, 16 bp, synthetic construct
  source 1..16: mol_type = other DNA
tatgactcttacgtgt

SEQ ID NO: 1592 - DNA, 16 bp, synthetic construct
  source 1..16: mol_type = other DNA
atatgactcttacgtg

SEQ ID NO: 1593 - DNA, 16 bp, synthetic construct
  source 1..16: mol_type = other DNA
taccttgagtgaccca

SEQ ID NO: 1594 - DNA, 16 bp, synthetic construct
  source 1..16: mol_type = other DNA
ttaccttgagtgaccc

SEQ ID NO: 1595 - DNA, 16 bp, synthetic construct
  source 1..16: mol_type = other DNA
tcggtaatgctatgca

SEQ ID NO: 1596 - DNA, 16 bp, synthetic construct
  source 1..16: mol_type = other DNA
atcggtaatgctatgc

SEQ ID NO: 1597 - DNA, 16 bp, synthetic construct
  source 1..16: mol_type = other DNA
cgctcttggttgacat

SEQ ID NO: 1598 - DNA, 16 bp, synthetic construct
  source 1..16: mol_type = other DNA
tcgctcttggttgaca

SEQ ID NO: 1599 - DNA, 16 bp, synthetic construct
  source 1..16: mol_type = other DNA
gtcattgtatagccag

SEQ ID NO: 1600 - DNA, 16 bp, synthetic construct
  source 1..16: mol_type = other DNA
ctgtcattgtatagcc

SEQ ID NO: 1601 - DNA, 16 bp, synthetic construct
  source 1..16: mol_type = other DNA
cttgagtaccttacac

SEQ ID NO: 1602 - DNA, 16 bp, synthetic construct
  source 1..16: mol_type = other DNA
gaccctagcacttgag

SEQ ID NO: 1603 - DNA, 16 bp, synthetic construct
  source 1..16: mol_type = other DNA
agaccctagcacttga

SEQ ID NO: 1604 - DNA, 16 bp, synthetic construct
  source 1..16: mol_type = other DNA
gattgggcttggacac

SEQ ID NO: 1605 - DNA, 16 bp, synthetic construct
  source 1..16: mol_type = other DNA
tgattgggcttggaca

SEQ ID NO: 1606 - DNA, 16 bp, synthetic construct
  source 1..16: mol_type = other DNA
ttgattgggcttggac

SEQ ID NO: 1607 - DNA, 16 bp, synthetic construct
  source 1..16: mol_type = other DNA
cgatagttcagtcttc

SEQ ID NO: 1608 - DNA, 16 bp, synthetic construct
  source 1..16: mol_type = other DNA
gcgatagttcagtctt

SEQ ID NO: 1609 - DNA, 16 bp, synthetic construct
  source 1..16: mol_type = other DNA
tgcgatagttcagtct

SEQ ID NO: 1610 - DNA, 16 bp, synthetic construct
  source 1..16: mol_type = other DNA
gtgcgatagttcagtc

SEQ ID NO: 1611 - DNA, 16 bp, synthetic construct
  source 1..16: mol_type = other DNA
tgtgcgatagttcagt

SEQ ID NO: 1612 - DNA, 16 bp, synthetic construct
  source 1..16: mol_type = other DNA
atgtgcgatagttcag

SEQ ID NO: 1613 - DNA, 16 bp, synthetic construct
  source 1..16: mol_type = other DNA
aatgtgcgatagttca

SEQ ID NO: 1614 - DNA, 16 bp, synthetic construct
  source 1..16: mol_type = other DNA
taatgtgcgatagttc

SEQ ID NO: 1615 - DNA, 16 bp, synthetic construct
  source 1..16: mol_type = other DNA
gtaatgtgcgatagtt

SEQ ID NO: 1616 - DNA, 16 bp, synthetic construct
  source 1..16: mol_type = other DNA
ggtaatgtgcgatagt

SEQ ID NO: 1617 - DNA, 16 bp, synthetic construct
  source 1..16: mol_type = other DNA
taggtaatgtgcgata

SEQ ID NO: 1618 - DNA, 16 bp, synthetic construct
  source 1..16: mol_type = other DNA
ttaggtaatgtgcgat

SEQ ID NO: 1619 - DNA, 16 bp, synthetic construct
  source 1..16: mol_type = other DNA
cttaggtaatgtgcga

SEQ ID NO: 1620 - DNA, 16 bp, synthetic construct
  source 1..16: mol_type = other DNA
tcttaggtaatgtgcg

SEQ ID NO: 1621 - DNA, 16 bp, synthetic construct
  source 1..16: mol_type = other DNA
atctgtcacacaccgg

SEQ ID NO: 1622 - DNA, 16 bp, synthetic construct
  source 1..16: mol_type = other DNA
aatctgtcacacaccg

SEQ ID NO: 1623 - DNA, 16 bp, synthetic construct
  source 1..16: mol_type = other DNA
ctggtggttggtacaa

SEQ ID NO: 1624 - DNA, 16 bp, synthetic construct
  source 1..16: mol_type = other DNA
tgaagtagccatagcc

SEQ ID NO: 1625 - DNA, 16 bp, synthetic construct
  source 1..16: mol_type = other DNA
ctattataccagaggc

SEQ ID NO: 1626 - DNA, 16 bp, synthetic construct
  source 1..16: mol_type = other DNA
cgacatttcagcactt

SEQ ID NO: 1627 - DNA, 16 bp, synthetic construct
  source 1..16: mol_type = other DNA
acgacatttcagcact

SEQ ID NO: 1628 - DNA, 16 bp, synthetic construct
  source 1..16: mol_type = other DNA
tacgacatttcagcac

SEQ ID NO: 1629 - DNA, 16 bp, synthetic construct
  source 1..16: mol_type = other DNA
gtacgacatttcagca

SEQ ID NO: 1630 - DNA, 16 bp, synthetic construct
  source 1..16: mol_type = other DNA
agtacgacatttcagc

SEQ ID NO: 1631 - DNA, 16 bp, synthetic construct
  source 1..16: mol_type = other DNA
cagtacgacatttcag

SEQ ID NO: 1632 - DNA, 16 bp, synthetic construct
  source 1..16: mol_type = other DNA
tcagtacgacatttca

SEQ ID NO: 1633 - DNA, 16 bp, synthetic construct
  source 1..16: mol_type = other DNA
tgaagtgtcagtacga

SEQ ID NO: 1634 - DNA, 16 bp, synthetic construct
  source 1..16: mol_type = other DNA
ggagtctaggtagcta

SEQ ID NO: 1635 - DNA, 16 bp, synthetic construct
  source 1..16: mol_type = other DNA
gaaggcaccctacact

SEQ ID NO: 1636 - DNA, 16 bp, synthetic construct
  source 1..16: mol_type = other DNA
gtgaaggcaccctaca

SEQ ID NO: 1637 - DNA, 16 bp, synthetic construct
  source 1..16: mol_type = other DNA
gaagattacctagcag

SEQ ID NO: 1638 - DNA, 16 bp, synthetic construct
  source 1..16: mol_type = other DNA
ggcatagaagattacc

SEQ ID NO: 1639 - DNA, 16 bp, synthetic construct
  source 1..16: mol_type = other DNA
ccattagggcatagaa

SEQ ID NO: 1640 - DNA, 16 bp, synthetic construct
  source 1..16: mol_type = other DNA
gacgtggttctcctat

SEQ ID NO: 1641 - DNA, 16 bp, synthetic construct
  source 1..16: mol_type = other DNA
ccagaactattacgaa

SEQ ID NO: 1642 - DNA, 16 bp, synthetic construct
  source 1..16: mol_type = other DNA
accagaactattacga

SEQ ID NO: 1643 - DNA, 16 bp, synthetic construct
  source 1..16: mol_type = other DNA
gtaccagaactattac

SEQ ID NO: 1644 - DNA, 16 bp, synthetic construct
  source 1..16: mol_type = other DNA
gcagtaccagaactat

SEQ ID NO: 1645 - DNA, 16 bp, synthetic construct
  source 1..16: mol_type = other DNA
ggtctctttactggac

SEQ ID NO: 1646 - DNA, 16 bp, synthetic construct
  source 1..16: mol_type = other DNA
ccatcagcagtaccgt

SEQ ID NO: 1647 - DNA, 16 bp, synthetic construct
  source 1..16: mol_type = other DNA
cattgtgttgggacgt

SEQ ID NO: 1648 - DNA, 16 bp, synthetic construct
  source 1..16: mol_type = other DNA
gcattgtgttgggacg

SEQ ID NO: 1649 - DNA, 16 bp, synthetic construct
  source 1..16: mol_type = other DNA
gacctttagccactca

SEQ ID NO: 1650 - DNA, 16 bp, synthetic construct
  source 1..16: mol_type = other DNA
ccttgaccatattgca

SEQ ID NO: 1651 - DNA, 16 bp, synthetic construct
  source 1..16: mol_type = other DNA
gacccattatagtttc

SEQ ID NO: 1652 - DNA, 16 bp, synthetic construct
  source 1..16: mol_type = other DNA
cagacccattatagtt

SEQ ID NO: 1653 - DNA, 16 bp, synthetic construct
  source 1..16: mol_type = other DNA
tacagacccattatag

SEQ ID NO: 1654 - DNA, 16 bp, synthetic construct
  source 1..16: mol_type = other DNA
gctattacagacccat

SEQ ID NO: 1655 - DNA, 16 bp, synthetic construct
  source 1..16: mol_type = other DNA
cagcacgtttcttagc

SEQ ID NO: 1656 - DNA, 16 bp, synthetic construct
  source 1..16: mol_type = other DNA
gcagcacgtttcttag

SEQ ID NO: 1657 - DNA, 16 bp, synthetic construct
  source 1..16: mol_type = other DNA
tgcagcacgtttctta

SEQ ID NO: 1658 - DNA, 16 bp, synthetic construct
  source 1..16: mol_type = other DNA
tgatgtgtgtggaccc

SEQ ID NO: 1659 - DNA, 16 bp, synthetic construct
  source 1..16: mol_type = other DNA
ctatgggtgatgttag

SEQ ID NO: 1660 - DNA, 16 bp, synthetic construct
  source 1..16: mol_type = other DNA
gtgaacacctcctaga

SEQ ID NO: 1661 - DNA, 16 bp, synthetic construct
  source 1..16: mol_type = other DNA
gtctacctatgaacta

SEQ ID NO: 1662 - DNA, 16 bp, synthetic construct
  source 1..16: mol_type = other DNA
gctagaggaattgtat

SEQ ID NO: 1663 - DNA, 16 bp, synthetic construct
  source 1..16: mol_type = other DNA
gacccagtgaacctag

SEQ ID NO: 1664 - DNA, 16 bp, synthetic construct
  source 1..16: mol_type = other DNA
gtatgtaacctggagc

SEQ ID NO: 1665 - DNA, 16 bp, synthetic construct
  source 1..16: mol_type = other DNA
tttgtgaactttccgg

SEQ ID NO: 1666 - DNA, 16 bp, synthetic construct
  source 1..16: mol_type = other DNA
caagactgcctagtgg

SEQ ID NO: 1667 - DNA, 16 bp, synthetic construct
  source 1..16: mol_type = other DNA
acaagactgcctagtg

SEQ ID NO: 1668 - DNA, 16 bp, synthetic construct
  source 1..16: mol_type = other DNA
gacatccttagccagc

SEQ ID NO: 1669 - DNA, 16 bp, synthetic construct
  source 1..16: mol_type = other DNA
cttcaatagtgcagac

SEQ ID NO: 1670 - DNA, 16 bp, synthetic construct
  source 1..16: mol_type = other DNA
gcacagtagagtaatc

SEQ ID NO: 1671 - DNA, 16 bp, synthetic construct
  source 1..16: mol_type = other DNA
gacgtatccttccaaa

SEQ ID NO: 1672 - DNA, 16 bp, synthetic construct
  source 1..16: mol_type = other DNA
tcataagagagtagcc

SEQ ID NO: 1673 - DNA, 16 bp, synthetic construct
  source 1..16: mol_type = other DNA
tggatgaaggcgtatt

SEQ ID NO: 1674 - DNA, 16 bp, synthetic construct
  source 1..16: mol_type = other DNA
gtattgaccatgcctc

SEQ ID NO: 1675 - DNA, 16 bp, synthetic construct
  source 1..16: mol_type = other DNA
ggtcgtataatacttc

SEQ ID NO: 1676 - DNA, 16 bp, synthetic construct
  source 1..16: mol_type = other DNA
gggtcgtataatactt

SEQ ID NO: 1677 - DNA, 16 bp, synthetic construct
  source 1..16: mol_type = other DNA
agggtcgtataatact

SEQ ID NO: 1678 - DNA, 16 bp, synthetic construct
  source 1..16: mol_type = other DNA
aagggtcgtataatac

SEQ ID NO: 1679 - DNA, 16 bp, synthetic construct
  source 1..16: mol_type = other DNA
ctaagggtcgtataat

SEQ ID NO: 1680 - DNA, 16 bp, synthetic construct
  source 1..16: mol_type = other DNA
tgcaacagtctatggt

SEQ ID NO: 1681 - DNA, 16 bp, synthetic construct
  source 1..16: mol_type = other DNA
gttatgaggatggttc

SEQ ID NO: 1682 - DNA, 16 bp, synthetic construct
  source 1..16: mol_type = other DNA
atcgtatggatgggcc

SEQ ID NO: 1683 - DNA, 16 bp, synthetic construct
  source 1..16: mol_type = other DNA
gacaacattccatcgt

SEQ ID NO: 1684 - DNA, 16 bp, synthetic construct
  source 1..16: mol_type = other DNA
gttaaccctgtaccca

SEQ ID NO: 1685 - DNA, 16 bp, synthetic construct
  source 1..16: mol_type = other DNA
gtgttaaccctgtacc

SEQ ID NO: 1686 - DNA, 16 bp, synthetic construct
  source 1..16: mol_type = other DNA
gcgtagacatataatg

SEQ ID NO: 1687 - DNA, 16 bp, synthetic construct
  source 1..16: mol_type = other DNA
cgatgcaggtttatag

SEQ ID NO: 1688 - DNA, 16 bp, synthetic construct
  source 1..16: mol_type = other DNA
acgatgcaggtttata

SEQ ID NO: 1689 - DNA, 16 bp, synthetic construct
  source 1..16: mol_type = other DNA
gctgatttgtaggtag

SEQ ID NO: 1690 - DNA, 16 bp, synthetic construct
  source 1..16: mol_type = other DNA
ggctgatttgtaggta

SEQ ID NO: 1691 - DNA, 16 bp, synthetic construct
  source 1..16: mol_type = other DNA
gggctgatttgtaggt

SEQ ID NO: 1692 - DNA, 16 bp, synthetic construct
  source 1..16: mol_type = other DNA
caagcgaccacactgc

SEQ ID NO: 1693 - DNA, 16 bp, synthetic construct
  source 1..16: mol_type = other DNA
acaagcgaccacactg

SEQ ID NO: 1694 - DNA, 16 bp, synthetic construct
  source 1..16: mol_type = other DNA
gacaagcgaccacact

SEQ ID NO: 1695 - DNA, 16 bp, synthetic construct
  source 1..16: mol_type = other DNA
ggacaagcgaccacac

SEQ ID NO: 1696 - DNA, 16 bp, synthetic construct
  source 1..16: mol_type = other DNA
gagtaagtgccaaccc

SEQ ID NO: 1697 - DNA, 16 bp, synthetic construct
  source 1..16: mol_type = other DNA
agagtaagtgccaacc

SEQ ID NO: 1698 - DNA, 16 bp, synthetic construct
  source 1..16: mol_type = other DNA
agatgcgggactattt

SEQ ID NO: 1699 - DNA, 16 bp, synthetic construct
  source 1..16: mol_type = other DNA
cagatgcgggactatt

SEQ ID NO: 1700 - DNA, 16 bp, synthetic construct
  source 1..16: mol_type = other DNA
ccagatgcgggactat

SEQ ID NO: 1701 - DNA, 16 bp, synthetic construct
  source 1..16: mol_type = other DNA
gccttagatccatgat

SEQ ID NO: 1702 - DNA, 16 bp, synthetic construct
  source 1..16: mol_type = other DNA
gtgccttagatccatg

SEQ ID NO: 1703 - DNA, 16 bp, synthetic construct
  source 1..16: mol_type = other DNA
agtgccttagatccat

SEQ ID NO: 1704 - DNA, 16 bp, synthetic construct
  source 1..16: mol_type = other DNA
gagtgccttagatcca

SEQ ID NO: 1705 - DNA, 16 bp, synthetic construct
  source 1..16: mol_type = other DNA
tcctcatcaataggtc

SEQ ID NO: 1706 - DNA, 16 bp, synthetic construct
  source 1..16: mol_type = other DNA
aggtctatgtcagtgc

SEQ ID NO: 1707 - DNA, 16 bp, synthetic construct
  source 1..16: mol_type = other DNA
cataacacacggctag

SEQ ID NO: 1708 - DNA, 16 bp, synthetic construct
  source 1..16: mol_type = other DNA
gcataacacacggcta

SEQ ID NO: 1709 - DNA, 16 bp, synthetic construct
  source 1..16: mol_type = other DNA
agcataacacacggct

SEQ ID NO: 1710 - DNA, 16 bp, synthetic construct
  source 1..16: mol_type = other DNA
cagcataacacacggc

SEQ ID NO: 1711 - DNA, 16 bp, synthetic construct
  source 1..16: mol_type = other DNA
acagcataacacacgg

SEQ ID NO: 1712 - DNA, 16 bp, synthetic construct
  source 1..16: mol_type = other DNA
cacagcataacacacg

SEQ ID NO: 1713 - DNA, 16 bp, synthetic construct
  source 1..16: mol_type = other DNA
gttagaagcactccac

SEQ ID NO: 1714 - DNA, 16 bp, synthetic construct
  source 1..16: mol_type = other DNA
aggcttcaggacggac

SEQ ID NO: 1715 - DNA, 16 bp, synthetic construct
  source 1..16: mol_type = other DNA
tagagttcagccctcc

SEQ ID NO: 1716 - DNA, 16 bp, synthetic construct
  source 1..16: mol_type = other DNA
gcaggagtttcagtcg

SEQ ID NO: 1717 - DNA, 16 bp, synthetic construct
  source 1..16: mol_type = other DNA
aagcggtgaatgttgc

SEQ ID NO: 1718 - DNA, 16 bp, synthetic construct
  source 1..16: mol_type = other DNA
cgcagaagttgtcaga

SEQ ID NO: 1719 - DNA, 16 bp, synthetic construct
  source 1..16: mol_type = other DNA
agaggttcatgcgggt

SEQ ID NO: 1720 - DNA, 16 bp, synthetic construct
  source 1..16: mol_type = other DNA
taaagaggttcatgcg

SEQ ID NO: 1721 - DNA, 16 bp, synthetic construct
  source 1..16: mol_type = other DNA
accacaggatcggatg

SEQ ID NO: 1722 - DNA, 16 bp, synthetic construct
  source 1..16: mol_type = other DNA
gaccacaggatcggat

SEQ ID NO: 1723 - DNA, 16 bp, synthetic construct
  source 1..16: mol_type = other DNA
ggtgctaatgactcta

SEQ ID NO: 1724 - DNA, 16 bp, synthetic construct
  source 1..16: mol_type = other DNA
ggtccctattcaattg

SEQ ID NO: 1725 - DNA, 16 bp, synthetic construct
  source 1..16: mol_type = other DNA
gtataagcctagctca

SEQ ID NO: 1726 - DNA, 16 bp, synthetic construct
  source 1..16: mol_type = other DNA
ctatgcacctatttgg

SEQ ID NO: 1727 - DNA, 16 bp, synthetic construct
  source 1..16: mol_type = other DNA
agttctgttcgatgtc

SEQ ID NO: 1728 - DNA, 16 bp, synthetic construct
  source 1..16: mol_type = other DNA
aagttctgttcgatgt

SEQ ID NO: 1729 - DNA, 16 bp, synthetic construct
  source 1..16: mol_type = other DNA
aaagttctgttcgatg

SEQ ID NO: 1730 - DNA, 16 bp, synthetic construct
  source 1..16: mol_type = other DNA
gtatgggattcaggtg

SEQ ID NO: 1731 - DNA, 16 bp, synthetic construct
  source 1..16: mol_type = other DNA
atggagtatgggattc

SEQ ID NO: 1732 - DNA, 16 bp, synthetic construct
  source 1..16: mol_type = other DNA
gtagacattgaccttc

SEQ ID NO: 1733 - DNA, 16 bp, synthetic construct
  source 1..16: mol_type = other DNA
ggtctaacacaatggc

SEQ ID NO: 1734 - DNA, 16 bp, synthetic construct
  source 1..16: mol_type = other DNA
gaacggatgccagcac

SEQ ID NO: 1735 - DNA, 16 bp, synthetic construct
  source 1..16: mol_type = other DNA
ccttagaagcagaacg

SEQ ID NO: 1736 - DNA, 16 bp, synthetic construct
  source 1..16: mol_type = other DNA
cgatagtgagtttgca

SEQ ID NO: 1737 - DNA, 16 bp, synthetic construct
  source 1..16: mol_type = other DNA
acgatagtgagtttgc

SEQ ID NO: 1738 - DNA, 16 bp, synthetic construct
  source 1..16: mol_type = other DNA
tcataggtgatgggac

SEQ ID NO: 1739 - DNA, 16 bp, synthetic construct
  source 1..16: mol_type = other DNA
gttcaaggtctcgcac

SEQ ID NO: 1740 - DNA, 16 bp, synthetic construct
  source 1..16: mol_type = other DNA
ggttcaaggtctcgca

SEQ ID NO: 1741 - DNA, 16 bp, synthetic construct
  source 1..16: mol_type = other DNA
aggttcaaggtctcgc

SEQ ID NO: 1742 - DNA, 16 bp, synthetic construct
  source 1..16: mol_type = other DNA
acttctactagggcta

SEQ ID NO: 1743 - DNA, 16 bp, synthetic construct
  source 1..16: mol_type = other DNA
gtgctataaccaagac

SEQ ID NO: 1744 - DNA, 16 bp, synthetic construct
  source 1..16: mol_type = other DNA
ttcgagagaggaattc

SEQ ID NO: 1745 - DNA, 16 bp, synthetic construct
  source 1..16: mol_type = other DNA
ttgaacgtcatagtga

SEQ ID NO: 1746 - DNA, 16 bp, synthetic construct
  source 1..16: mol_type = other DNA
tttgaacgtcatagtg

SEQ ID NO: 1747 - DNA, 16 bp, synthetic construct
  source 1..16: mol_type = other DNA
gctatcctcgtgatac

SEQ ID NO: 1748 - DNA, 16 bp, synthetic construct
  source 1..16: mol_type = other DNA
gcccttgttaaagtac

SEQ ID NO: 1749 - DNA, 16 bp, synthetic construct
  source 1..16: mol_type = other DNA
ggtgctgctattctac

SEQ ID NO: 1750 - DNA, 16 bp, synthetic construct
  source 1..16: mol_type = other DNA
ttatgcgtctttggag

SEQ ID NO: 1751 - DNA, 16 bp, synthetic construct
  source 1..16: mol_type = other DNA
tttatgcgtctttgga

SEQ ID NO: 1752 - DNA, 16 bp, synthetic construct
  source 1..16: mol_type = other DNA
gtttatgcgtctttgg

SEQ ID NO: 1753 - DNA, 16 bp, synthetic construct
  source 1..16: mol_type = other DNA
ctaccactcaataggc

SEQ ID NO: 1754 - DNA, 16 bp, synthetic construct
  source 1..16: mol_type = other DNA
tatgttatggatgccc

SEQ ID NO: 1755 - DNA, 16 bp, synthetic construct
  source 1..16: mol_type = other DNA
gttatgttatggatgc

SEQ ID NO: 1756 - DNA, 16 bp, synthetic construct
  source 1..16: mol_type = other DNA
ggtttagctctcagac

SEQ ID NO: 1757 - DNA, 16 bp, synthetic construct
  source 1..16: mol_type = other DNA
gcattggtttagctct

SEQ ID NO: 1758 - DNA, 16 bp, synthetic construct
  source 1..16: mol_type = other DNA
gacccaagttatgcca

SEQ ID NO: 1759 - DNA, 16 bp, synthetic construct
  source 1..16: mol_type = other DNA
agacccaagttatgcc

SEQ ID NO: 1760 - DNA, 16 bp, synthetic construct
  source 1..16: mol_type = other DNA
gagacccaagttatgc

SEQ ID NO: 1761 - DNA, 16 bp, synthetic construct
  source 1..16: mol_type = other DNA
gacatctcttatgggt

SEQ ID NO: 1762 - DNA, 16 bp, synthetic construct
  source 1..16: mol_type = other DNA
atccatgcagattgac

SEQ ID NO: 1763 - DNA, 16 bp, synthetic construct
  source 1..16: mol_type = other DNA
accctgtatgagatcc

SEQ ID NO: 1764 - DNA, 16 bp, synthetic construct
  source 1..16: mol_type = other DNA
taccctgtatgagatc

SEQ ID NO: 1765 - DNA, 16 bp, synthetic construct
  source 1..16: mol_type = other DNA
gtaccctgtatgagat

SEQ ID NO: 1766 - DNA, 16 bp, synthetic construct
  source 1..16: mol_type = other DNA
agtaccctgtatgaga

SEQ ID NO: 1767 - DNA, 16 bp, synthetic construct
  source 1..16: mol_type = other DNA
tatgaagtctagtggg

SEQ ID NO: 1768 - DNA, 16 bp, synthetic construct
  source 1..16: mol_type = other DNA
ttagattggtggcatg

SEQ ID NO: 1769 - DNA, 16 bp, synthetic construct
  source 1..16: mol_type = other DNA
gaattagattggtggc

SEQ ID NO: 1770 - DNA, 16 bp, synthetic construct
  source 1..16: mol_type = other DNA
tttcgtttagtgagag

SEQ ID NO: 1771 - DNA, 16 bp, synthetic construct
  source 1..16: mol_type = other DNA
agctagataagtctcc

SEQ ID NO: 1772 - DNA, 16 bp, synthetic construct
  source 1..16: mol_type = other DNA
gaccctattaccaaga

SEQ ID NO: 1773 - DNA, 16 bp, synthetic construct
  source 1..16: mol_type = other DNA
gcaaggcacatatccc

SEQ ID NO: 1774 - DNA, 16 bp, synthetic construct
  source 1..16: mol_type = other DNA
gagtacatcctgattc

SEQ ID NO: 1775 - DNA, 16 bp, synthetic construct
  source 1..16: mol_type = other DNA
gtccatgaattgtgtc

SEQ ID NO: 1776 - DNA, 16 bp, synthetic construct
  source 1..16: mol_type = other DNA
tgacaatcggctatgc

SEQ ID NO: 1777 - DNA, 16 bp, synthetic construct
  source 1..16: mol_type = other DNA
ctgacaatcggctatg

SEQ ID NO: 1778 - DNA, 16 bp, synthetic construct
  source 1..16: mol_type = other DNA
atgtgctgacaatcgg

SEQ ID NO: 1779 - DNA, 16 bp, synthetic construct
  source 1..16: mol_type = other DNA
aatgtgctgacaatcg

SEQ ID NO: 1780 - DNA, 16 bp, synthetic construct
  source 1..16: mol_type = other DNA
ggaggagtgtagtttc

SEQ ID NO: 1781 - DNA, 16 bp, synthetic construct
  source 1..16: mol_type = other DNA
tcatgtttggtaggac

SEQ ID NO: 1782 - DNA, 16 bp, synthetic construct
  source 1..16: mol_type = other DNA
gacttattgaacaggg

SEQ ID NO: 1783 - DNA, 16 bp, synthetic construct
  source 1..16: mol_type = other DNA
ggacttattgaacagg

SEQ ID NO: 1784 - DNA, 16 bp, synthetic construct
  source 1..16: mol_type = other DNA
tagcagactagaccca

SEQ ID NO: 1785 - DNA, 16 bp, synthetic construct
  source 1..16: mol_type = other DNA
ttagcagactagaccc

SEQ ID NO: 1786 - DNA, 16 bp, synthetic construct
  source 1..16: mol_type = other DNA
tttagcagactagacc

SEQ ID NO: 1787 - DNA, 16 bp, synthetic construct
  source 1..16: mol_type = other DNA
gcccaccatcaagtag

SEQ ID NO: 1788 - DNA, 16 bp, synthetic construct
  source 1..16: mol_type = other DNA
atcctactcaaacggc

SEQ ID NO: 1789 - DNA, 16 bp, synthetic construct
  source 1..16: mol_type = other DNA
ggtcaatcctactcaa

SEQ ID NO: 1790 - DNA, 16 bp, synthetic construct
  source 1..16: mol_type = other DNA
aatcctcggtggcaaa

SEQ ID NO: 1791 - DNA, 16 bp, synthetic construct
  source 1..16: mol_type = other DNA
caatcctcggtggcaa

SEQ ID NO: 1792 - DNA, 16 bp, synthetic construct
  source 1..16: mol_type = other DNA
gtccagtgaatgctat

SEQ ID NO: 1793 - DNA, 16 bp, synthetic construct
  source 1..16: mol_type = other DNA
cctcattcacacgaac

SEQ ID NO: 1794 - DNA, 16 bp, synthetic construct
  source 1..16: mol_type = other DNA
ccctcattcacacgaa

SEQ ID NO: 1795 - DNA, 16 bp, synthetic construct
  source 1..16: mol_type = other DNA
ctcatgccagtttagc

SEQ ID NO: 1796 - DNA, 16 bp, synthetic construct
  source 1..16: mol_type = other DNA
gactcatgccagttta

SEQ ID NO: 1797 - DNA, 16 bp, synthetic construct
  source 1..16: mol_type = other DNA
aacctcactcccgatg

SEQ ID NO: 1798 - DNA, 16 bp, synthetic construct
  source 1..16: mol_type = other DNA
gcaacctcactcccga

SEQ ID NO: 1799 - DNA, 16 bp, synthetic construct
  source 1..16: mol_type = other DNA
ggtagttcaggtctcc

SEQ ID NO: 1800 - DNA, 16 bp, synthetic construct
  source 1..16: mol_type = other DNA
acagacacctcgtgcc

SEQ ID NO: 1801 - DNA, 16 bp, synthetic construct
  source 1..16: mol_type = other DNA
tacagacacctcgtgc

SEQ ID NO: 1802 - DNA, 16 bp, synthetic construct
  source 1..16: mol_type = other DNA
ttacagacacctcgtg

SEQ ID NO: 1803 - DNA, 16 bp, synthetic construct
  source 1..16: mol_type = other DNA
gtactatgatctcttg

SEQ ID NO: 1804 - DNA, 16 bp, synthetic construct
  source 1..16: mol_type = other DNA
gatgtactatgatctc

SEQ ID NO: 1805 - DNA, 16 bp, synthetic construct
  source 1..16: mol_type = other DNA
gcactaacttcctagc

SEQ ID NO: 1806 - DNA, 16 bp, synthetic construct
  source 1..16: mol_type = other DNA
cggcactaacttccta

SEQ ID NO: 1807 - DNA, 16 bp, synthetic construct
  source 1..16: mol_type = other DNA
tctcacttggacaccg

SEQ ID NO: 1808 - DNA, 16 bp, synthetic construct
  source 1..16: mol_type = other DNA
cgtgcccaaacctgac

SEQ ID NO: 1809 - DNA, 16 bp, synthetic construct
  source 1..16: mol_type = other DNA
acgtgcccaaacctga

SEQ ID NO: 1810 - DNA, 16 bp, synthetic construct
  source 1..16: mol_type = other DNA
ggtctactttaacatc

SEQ ID NO: 1811 - DNA, 16 bp, synthetic construct
  source 1..16: mol_type = other DNA
gtcctctacagcaagc

SEQ ID NO: 1812 - DNA, 16 bp, synthetic construct
  source 1..16: mol_type = other DNA
gcactccaacactatc

SEQ ID NO: 1813 - DNA, 16 bp, synthetic construct
  source 1..16: mol_type = other DNA
tagcactccaacacta

SEQ ID NO: 1814 - DNA, 16 bp, synthetic construct
  source 1..16: mol_type = other DNA
cttagcactccaacac

SEQ ID NO: 1815 - DNA, 16 bp, synthetic construct
  source 1..16: mol_type = other DNA
ttacgtatgaattccc

SEQ ID NO: 1816 - DNA, 16 bp, synthetic construct
  source 1..16: mol_type = other DNA
cttacgtatgaattcc

SEQ ID NO: 1817 - DNA, 16 bp, synthetic construct
  source 1..16: mol_type = other DNA
gatgtacctcctgcaa

SEQ ID NO: 1818 - DNA, 16 bp, synthetic construct
  source 1..16: mol_type = other DNA
gctctaggatgtacct

SEQ ID NO: 1819 - DNA, 16 bp, synthetic construct
  source 1..16: mol_type = other DNA
agctctaggatgtacc

SEQ ID NO: 1820 - DNA, 16 bp, synthetic construct
  source 1..16: mol_type = other DNA
cagctctaggatgtac

SEQ ID NO: 1821 - DNA, 16 bp, synthetic construct
  source 1..16: mol_type = other DNA
gagtgatccattgccc

SEQ ID NO: 1822 - DNA, 16 bp, synthetic construct
  source 1..16: mol_type = other DNA
tgagtgatccattgcc

SEQ ID NO: 1823 - DNA, 16 bp, synthetic construct
  source 1..16: mol_type = other DNA
gtgagtgatccattgc

SEQ ID NO: 1824 - DNA, 16 bp, synthetic construct
  source 1..16: mol_type = other DNA
cgtccatgtgagtgat

SEQ ID NO: 1825 - DNA, 16 bp, synthetic construct
  source 1..16: mol_type = other DNA
agagcgtccatgtgag

SEQ ID NO: 1826 - DNA, 16 bp, synthetic construct
  source 1..16: mol_type = other DNA
aagagcgtccatgtga

SEQ ID NO: 1827 - DNA, 16 bp, synthetic construct
  source 1..16: mol_type = other DNA
ctcggaaattcacagc

SEQ ID NO: 1828 - DNA, 16 bp, synthetic construct
  source 1..16: mol_type = other DNA
ggaaactcggaaattc

SEQ ID NO: 1829 - DNA, 16 bp, synthetic construct
  source 1..16: mol_type = other DNA
ggtgcttgagagattc

SEQ ID NO: 1830 - DNA, 16 bp, synthetic construct
  source 1..16: mol_type = other DNA
ccatgagggtttaggt

SEQ ID NO: 1831 - DNA, 16 bp, synthetic construct
  source 1..16: mol_type = other DNA
ctcattatgacagtcc

SEQ ID NO: 1832 - DNA, 16 bp, synthetic construct
  source 1..16: mol_type = other DNA
agtagtgaatagaccc

SEQ ID NO: 1833 - DNA, 16 bp, synthetic construct
  source 1..16: mol_type = other DNA
cagtagtgaatagacc

SEQ ID NO: 1834 - DNA, 16 bp, synthetic construct
  source 1..16: mol_type = other DNA
ggtaacactagctgca

SEQ ID NO: 1835 - DNA, 16 bp, synthetic construct
  source 1..16: mol_type = other DNA
tatatctgtggagggc

SEQ ID NO: 1836 - DNA, 16 bp, synthetic construct
  source 1..16: mol_type = other DNA
gtacctatatctgtgg

SEQ ID NO: 1837 - DNA, 16 bp, synthetic construct
  source 1..16: mol_type = other DNA
gcagtacctatatctg

SEQ ID NO: 1838 - DNA, 16 bp, synthetic construct
  source 1..16: mol_type = other DNA
ggcagtacctatatct

SEQ ID NO: 1839 - DNA, 16 bp, synthetic construct
  source 1..16: mol_type = other DNA
gctccaaccaatcaag

SEQ ID NO: 1840 - DNA, 16 bp, synthetic construct
  source 1..16: mol_type = other DNA
tcttgatgagaggtac

SEQ ID NO: 1841 - DNA, 16 bp, synthetic construct
  source 1..16: mol_type = other DNA
tagcctgacacacctc

SEQ ID NO: 1842 - DNA, 16 bp, synthetic construct
  source 1..16: mol_type = other DNA
tctagcctgacacacc

SEQ ID NO: 1843 - DNA, 16 bp, synthetic construct
  source 1..16: mol_type = other DNA
cggtttgttgaagagt

SEQ ID NO: 1844 - DNA, 16 bp, synthetic construct
  source 1..16: mol_type = other DNA
ctcggtttgttgaaga

SEQ ID NO: 1845 - DNA, 16 bp, synthetic construct
  source 1..16: mol_type = other DNA
tctcggtttgttgaag

SEQ ID NO: 1846 - DNA, 16 bp, synthetic construct
  source 1..16: mol_type = other DNA
ctctcggtttgttgaa

SEQ ID NO: 1847 - DNA, 16 bp, synthetic construct
  source 1..16: mol_type = other DNA
gctctcggtttgttga

SEQ ID NO: 1848 - DNA, 16 bp, synthetic construct
  source 1..16: mol_type = other DNA
agctctcggtttgttg

SEQ ID NO: 1849 - DNA, 16 bp, synthetic construct
  source 1..16: mol_type = other DNA
tacacccagattagag

SEQ ID NO: 1850 - DNA, 16 bp, synthetic construct
  source 1..16: mol_type = other DNA
gttactaagcaggtct

SEQ ID NO: 1851 - DNA, 16 bp, synthetic construct
  source 1..16: mol_type = other DNA
agttactaagcaggtc

SEQ ID NO: 1852 - DNA, 16 bp, synthetic construct
  source 1..16: mol_type = other DNA
gacccagtgagtagtt

SEQ ID NO: 1853 - DNA, 16 bp, synthetic construct
  source 1..16: mol_type = other DNA
agcttgtccattaagg

SEQ ID NO: 1854 - DNA, 16 bp, synthetic construct
  source 1..16: mol_type = other DNA
gtaaggcattatcacc

SEQ ID NO: 1855 - DNA, 16 bp, synthetic construct
  source 1..16: mol_type = other DNA
gggtacagacaacatc

SEQ ID NO: 1856 - DNA, 16 bp, synthetic construct
  source 1..16: mol_type = other DNA
cgggtacagacaacat

SEQ ID NO: 1857 - DNA, 16 bp, synthetic construct
  source 1..16: mol_type = other DNA
gcgaggtcacatacaa

SEQ ID NO: 1858 - DNA, 16 bp, synthetic construct
  source 1..16: mol_type = other DNA
agcgaggtcacataca

SEQ ID NO: 1859 - DNA, 16 bp, synthetic construct
  source 1..16: mol_type = other DNA
cagcgaggtcacatac

SEQ ID NO: 1860 - DNA, 16 bp, synthetic construct
  source 1..16: mol_type = other DNA
ccagcgaggtcacata

SEQ ID NO: 1861 - DNA, 16 bp, synthetic construct
  source 1..16: mol_type = other DNA
ggcacacctagctcac

SEQ ID NO: 1862 - DNA, 16 bp, synthetic construct
  source 1..16: mol_type = other DNA
actatttggaggcggc

SEQ ID NO: 1863 - DNA, 16 bp, synthetic construct
  source 1..16: mol_type = other DNA
aactatttggaggcgg

SEQ ID NO: 1864 - DNA, 16 bp, synthetic construct
  source 1..16: mol_type = other DNA
gaactatttggaggcg

SEQ ID NO: 1865 - DNA, 16 bp, synthetic construct
  source 1..16: mol_type = other DNA
gtgacctactttgaac

SEQ ID NO: 1866 - DNA, 16 bp, synthetic construct
  source 1..16: mol_type = other DNA
tgaaggcaccgcatgg

SEQ ID NO: 1867 - DNA, 16 bp, synthetic construct
  source 1..16: mol_type = other DNA
ttgaaggcaccgcatg

SEQ ID NO: 1868 - DNA, 16 bp, synthetic construct
  source 1..16: mol_type = other DNA
gttgaaggcaccgcat

SEQ ID NO: 1869 - DNA, 16 bp, synthetic construct
  source 1..16: mol_type = other DNA
catgtgagtagggttg

SEQ ID NO: 1870 - DNA, 16 bp, synthetic construct
  source 1..16: mol_type = other DNA
tgtattagccagaccc

SEQ ID NO: 1871 - DNA, 16 bp, synthetic construct
  source 1..16: mol_type = other DNA
gtagttgtgagtaact

SEQ ID NO: 1872 - DNA, 16 bp, synthetic construct
  source 1..16: mol_type = other DNA
tgtagttgtgagtaac

SEQ ID NO: 1873 - DNA, 16 bp, synthetic construct
  source 1..16: mol_type = other DNA
actctaactttcacga

SEQ ID NO: 1874 - DNA, 16 bp, synthetic construct
  source 1..16: mol_type = other DNA
gcccaccttgcatcaa

SEQ ID NO: 1875 - DNA, 16 bp, synthetic construct
  source 1..16: mol_type = other DNA
ggtcagtcaccctatc

SEQ ID NO: 1876 - DNA, 16 bp, synthetic construct
  source 1..16: mol_type = other DNA
ggactactctttacca

SEQ ID NO: 1877 - DNA, 16 bp, synthetic construct
  source 1..16: mol_type = other DNA
aggactactctttacc

SEQ ID NO: 1878 - DNA, 16 bp, synthetic construct
  source 1..16: mol_type = other DNA
ctggttagttgataac

SEQ ID NO: 1879 - DNA, 16 bp, synthetic construct
  source 1..16: mol_type = other DNA
cgaagagttgatgtta

SEQ ID NO: 1880 - DNA, 16 bp, synthetic construct
  source 1..16: mol_type = other DNA
ccgaagagttgatgtt

SEQ ID NO: 1881 - DNA, 16 bp, synthetic construct
  source 1..16: mol_type = other DNA
tccgaagagttgatgt

SEQ ID NO: 1882 - DNA, 16 bp, synthetic construct
  source 1..16: mol_type = other DNA
ctccgaagagttgatg

SEQ ID NO: 1883 - DNA, 16 bp, synthetic construct
  source 1..16: mol_type = other DNA
ttccacgtaacaacag

SEQ ID NO: 1884 - DNA, 16 bp, synthetic construct
  source 1..16: mol_type = other DNA
tattccacgtaacaac

SEQ ID NO: 1885 - DNA, 16 bp, synthetic construct
  source 1..16: mol_type = other DNA
gtattccacgtaacaa

SEQ ID NO: 1886 - DNA, 16 bp, synthetic construct
  source 1..16: mol_type = other DNA
gattgctcactcaagc

SEQ ID NO: 1887 - DNA, 16 bp, synthetic construct
  source 1..16: mol_type = other DNA
gttggactctttggga

SEQ ID NO: 1888 - DNA, 16 bp, synthetic construct
  source 1..16: mol_type = other DNA
catcctctgaatgcgt

SEQ ID NO: 1889 - DNA, 16 bp, synthetic construct
  source 1..16: mol_type = other DNA
acatcctctgaatgcg

SEQ ID NO: 1890 - DNA, 16 bp, synthetic construct
  source 1..16: mol_type = other DNA
gccaaaggtatcactc

SEQ ID NO: 1891 - DNA, 16 bp, synthetic construct
  source 1..16: mol_type = other DNA
acgagtcccattcttg

SEQ ID NO: 1892 - DNA, 16 bp, synthetic construct
  source 1..16: mol_type = other DNA
tcaccacgagtcccat

SEQ ID NO: 1893 - DNA, 16 bp, synthetic construct
  source 1..16: mol_type = other DNA
taatcaccacgagtcc

SEQ ID NO: 1894 - DNA, 16 bp, synthetic construct
  source 1..16: mol_type = other DNA
ttaatcaccacgagtc

SEQ ID NO: 1895 - DNA, 16 bp, synthetic construct
  source 1..16: mol_type = other DNA
attaatcaccacgagt

SEQ ID NO: 1896 - DNA, 16 bp, synthetic construct
  source 1..16: mol_type = other DNA
gtgtagttctggtctg

SEQ ID NO: 1897 - DNA, 16 bp, synthetic construct
  source 1..16: mol_type = other DNA
ggtgtagttctggtct

SEQ ID NO: 1898 - DNA, 16 bp, synthetic construct
  source 1..16: mol_type = other DNA
gtggtgtagttctggt

SEQ ID NO: 1899 - DNA, 16 bp, synthetic construct
  source 1..16: mol_type = other DNA
gcttgaacttatatgg

SEQ ID NO: 1900 - DNA, 16 bp, synthetic construct
  source 1..16: mol_type = other DNA
ggcttgaacttatatg

SEQ ID NO: 1901 - DNA, 16 bp, synthetic construct
  source 1..16: mol_type = other DNA
aactcgtttagcagct

SEQ ID NO: 1902 - DNA, 16 bp, synthetic construct
  source 1..16: mol_type = other DNA
aaactcgtttagcagc

SEQ ID NO: 1903 - DNA, 16 bp, synthetic construct
  source 1..16: mol_type = other DNA
ttccaccgcagcacaa

SEQ ID NO: 1904 - DNA, 16 bp, synthetic construct
  source 1..16: mol_type = other DNA
attccaccgcagcaca

SEQ ID NO: 1905 - DNA, 16 bp, synthetic construct
  source 1..16: mol_type = other DNA
atgctaatcccttagg

SEQ ID NO: 1906 - DNA, 16 bp, synthetic construct
  source 1..16: mol_type = other DNA
gtgacaatgctaatcc

SEQ ID NO: 1907 - DNA, 16 bp, synthetic construct
  source 1..16: mol_type = other DNA
gtcatgcctacagtgt

SEQ ID NO: 1908 - DNA, 16 bp, synthetic construct
  source 1..16: mol_type = other DNA
ttattaagggtcatgc

SEQ ID NO: 1909 - DNA, 16 bp, synthetic construct
  source 1..16: mol_type = other DNA
ttagattagccttggg

SEQ ID NO: 1910 - DNA, 16 bp, synthetic construct
  source 1..16: mol_type = other DNA
cttagattagccttgg

SEQ ID NO: 1911 - DNA, 16 bp, synthetic construct
  source 1..16: mol_type = other DNA
gactgctatgacacta

SEQ ID NO: 1912 - DNA, 16 bp, synthetic construct
  source 1..16: mol_type = other DNA
ggactgctatgacact

SEQ ID NO: 1913 - DNA, 16 bp, synthetic construct
  source 1..16: mol_type = other DNA
tactgaaacgggatct

SEQ ID NO: 1914 - DNA, 16 bp, synthetic construct
  source 1..16: mol_type = other DNA
tttactgaaacgggat

SEQ ID NO: 1915 - DNA, 16 bp, synthetic construct
  source 1..16: mol_type = other DNA
catcaaggtcagttgg

SEQ ID NO: 1916 - DNA, 16 bp, synthetic construct
  source 1..16: mol_type = other DNA
gggcataactcttggg

SEQ ID NO: 1917 - DNA, 16 bp, synthetic construct
  source 1..16: mol_type = other DNA
cgagaacttctatgag

SEQ ID NO: 1918 - DNA, 16 bp, synthetic construct
  source 1..16: mol_type = other DNA
ccgagaacttctatga

SEQ ID NO: 1919 - DNA, 16 bp, synthetic construct
  source 1..16: mol_type = other DNA
cttcaggcttagttag

SEQ ID NO: 1920 - DNA, 16 bp, synthetic construct
  source 1..16: mol_type = other DNA
gccctagtcttaccag

SEQ ID NO: 1921 - DNA, 16 bp, synthetic construct
  source 1..16: mol_type = other DNA
agccctagtcttacca

SEQ ID NO: 1922 - DNA, 16 bp, synthetic construct
  source 1..16: mol_type = other DNA
atagccctagtcttac

SEQ ID NO: 1923 - DNA, 16 bp, synthetic construct
  source 1..16: mol_type = other DNA
tttaatagccctagtc

SEQ ID NO: 1924 - DNA, 16 bp, synthetic construct
  source 1..16: mol_type = other DNA
ctttaatagccctagt

SEQ ID NO: 1925 - DNA, 16 bp, synthetic construct
  source 1..16: mol_type = other DNA
ttctgattacaagcgc

SEQ ID NO: 1926 - DNA, 16 bp, synthetic construct
  source 1..16: mol_type = other DNA
attctgattacaagcg

SEQ ID NO: 1927 - DNA, 16 bp, synthetic construct
  source 1..16: mol_type = other DNA
cactaaccaatagccc

SEQ ID NO: 1928 - DNA, 16 bp, synthetic construct
  source 1..16: mol_type = other DNA
ccactaaccaatagcc

SEQ ID NO: 1929 - DNA, 16 bp, synthetic construct
  source 1..16: mol_type = other DNA
tcaaccaacgaaatag

SEQ ID NO: 1930 - DNA, 16 bp, synthetic construct
  source 1..16: mol_type = other DNA
cttgggttatcataca

SEQ ID NO: 1931 - DNA, 16 bp, synthetic construct
  source 1..16: mol_type = other DNA
acttgggttatcatac

SEQ ID NO: 1932 - DNA, 16 bp, synthetic construct
  source 1..16: mol_type = other DNA
ccatgcagattagagt

SEQ ID NO: 1933 - DNA, 16 bp, synthetic construct
  source 1..16: mol_type = other DNA
tggattgagaggttac

SEQ ID NO: 1934 - DNA, 16 bp, synthetic construct
  source 1..16: mol_type = other DNA
gttggattgagaggtt

SEQ ID NO: 1935 - DNA, 16 bp, synthetic construct
  source 1..16: mol_type = other DNA
gctgaacaatcgagtg

SEQ ID NO: 1936 - DNA, 16 bp, synthetic construct
  source 1..16: mol_type = other DNA
agctgaacaatcgagt

SEQ ID NO: 1937 - DNA, 16 bp, synthetic construct
  source 1..16: mol_type = other DNA
tgagctgaacaatcga

SEQ ID NO: 1938 - DNA, 16 bp, synthetic construct
  source 1..16: mol_type = other DNA
gctatgctctagttgc

SEQ ID NO: 1939 - DNA, 16 bp, synthetic construct
  source 1..16: mol_type = other DNA
gcctagatgtgcccat

SEQ ID NO: 1940 - DNA, 16 bp, synthetic construct
  source 1..16: mol_type = other DNA
tagcctagatgtgccc

SEQ ID NO: 1941 - DNA, 16 bp, synthetic construct
  source 1..16: mol_type = other DNA
gtagcctagatgtgcc

SEQ ID NO: 1942 - DNA, 16 bp, synthetic construct
  source 1..16: mol_type = other DNA
cgtagcctagatgtgc

SEQ ID NO: 1943 - DNA, 16 bp, synthetic construct
  source 1..16: mol_type = other DNA
tcgtagcctagatgtg

SEQ ID NO: 1944 - DNA, 16 bp, synthetic construct
  source 1..16: mol_type = other DNA
ctgtcgtagcctagat

SEQ ID NO: 1945 - DNA, 16 bp, synthetic construct
  source 1..16: mol_type = other DNA
cctgtcgtagcctaga

SEQ ID NO: 1946 - DNA, 16 bp, synthetic construct
  source 1..16: mol_type = other DNA
tcctgtcgtagcctag

SEQ ID NO: 1947 - DNA, 16 bp, synthetic construct
  source 1..16: mol_type = other DNA
tagtgagcatctaagg

SEQ ID NO: 1948 - DNA, 16 bp, synthetic construct
  source 1..16: mol_type = other DNA
actagtctttgtagtg

SEQ ID NO: 1949 - DNA, 16 bp, synthetic construct
  source 1..16: mol_type = other DNA
agtctctacactagtc

SEQ ID NO: 1950 - DNA, 16 bp, synthetic construct
  source 1..16: mol_type = other DNA
tagcttggtcagaggg

SEQ ID NO: 1951 - DNA, 16 bp, synthetic construct
  source 1..16: mol_type = other DNA
gtagcttggtcagagg

SEQ ID NO: 1952 - DNA, 16 bp, synthetic construct
  source 1..16: mol_type = other DNA
ggtagcttggtcagag

SEQ ID NO: 1953 - DNA, 16 bp, synthetic construct
  source 1..16: mol_type = other DNA
gggtagcttggtcaga

SEQ ID NO: 1954 - DNA, 16 bp, synthetic construct
  source 1..16: mol_type = other DNA
tatgggtagcttggtc

SEQ ID NO: 1955 - DNA, 16 bp, synthetic construct
  source 1..16: mol_type = other DNA
ctatgggtagcttggt

SEQ ID NO: 1956 - DNA, 16 bp, synthetic construct
  source 1..16: mol_type = other DNA
ttgtaacttggtggac

SEQ ID NO: 1957 - DNA, 16 bp, synthetic construct
  source 1..16: mol_type = other DNA
cttgtaacttggtgga

SEQ ID NO: 1958 - DNA, 16 bp, synthetic construct
  source 1..16: mol_type = other DNA
gcttgtaacttggtgg

SEQ ID NO: 1959 - DNA, 16 bp, synthetic construct
  source 1..16: mol_type = other DNA
agcttgtaacttggtg

SEQ ID NO: 1960 - DNA, 16 bp, synthetic construct
  source 1..16: mol_type = other DNA
cagcttgtaacttggt

SEQ ID NO: 1961 - DNA, 16 bp, synthetic construct
  source 1..16: mol_type = other DNA
gctttgatgggttgac

SEQ ID NO: 1962 - DNA, 16 bp, synthetic construct
  source 1..16: mol_type = other DNA
acttgtgagtcctgtc

SEQ ID NO: 1963 - DNA, 16 bp, synthetic construct
  source 1..16: mol_type = other DNA
gtctacttgtgagtcc

SEQ ID NO: 1964 - DNA, 16 bp, synthetic construct
  source 1..16: mol_type = other DNA
gattactgagtccacc

SEQ ID NO: 1965 - DNA, 16 bp, synthetic construct
  source 1..16: mol_type = other DNA
cctaacccaactgtgc

SEQ ID NO: 1966 - DNA, 16 bp, synthetic construct
  source 1..16: mol_type = other DNA
acctaacccaactgtg

SEQ ID NO: 1967 - DNA, 16 bp, synthetic construct
  source 1..16: mol_type = other DNA
gagtgaccctgttgat

SEQ ID NO: 1968 - DNA, 16 bp, synthetic construct
  source 1..16: mol_type = other DNA
ctcattaactcccgag

SEQ ID NO: 1969 - DNA, 16 bp, synthetic construct
  source 1..16: mol_type = other DNA
cttggtttgatggcgc

SEQ ID NO: 1970 - DNA, 16 bp, synthetic construct
  source 1..16: mol_type = other DNA
tcttggtttgatggcg

SEQ ID NO: 1971 - DNA, 16 bp, synthetic construct
  source 1..16: mol_type = other DNA
gccctgtcaccaatag

SEQ ID NO: 1972 - DNA, 16 bp, synthetic construct
  source 1..16: mol_type = other DNA
gtcctaaaccatgcta

SEQ ID NO: 1973 - DNA, 16 bp, synthetic construct
  source 1..16: mol_type = other DNA
ccttacgcttaatcaa

SEQ ID NO: 1974 - DNA, 16 bp, synthetic construct
  source 1..16: mol_type = other DNA
ttatgatagacgggca

SEQ ID NO: 1975 - DNA, 16 bp, synthetic construct
  source 1..16: mol_type = other DNA
tttatgatagacgggc

SEQ ID NO: 1976 - DNA, 16 bp, synthetic construct
  source 1..16: mol_type = other DNA
gcatgtcctataacag

SEQ ID NO: 1977 - DNA, 16 bp, synthetic construct
  source 1..16: mol_type = other DNA
gttcagtaggtcagtc

SEQ ID NO: 1978 - DNA, 16 bp, synthetic construct
  source 1..16: mol_type = other DNA
ggaagttcagtaggtc

SEQ ID NO: 1979 - DNA, 16 bp, synthetic construct
  source 1..16: mol_type = other DNA
ggtcatgtagagtgct

SEQ ID NO: 1980 - DNA, 16 bp, synthetic construct
  source 1..16: mol_type = other DNA
tggtcatgtagagtgc

SEQ ID NO: 1981 - DNA, 16 bp, synthetic construct
  source 1..16: mol_type = other DNA
ctggtcatgtagagtg

SEQ ID NO: 1982 - DNA, 16 bp, synthetic construct
  source 1..16: mol_type = other DNA
gatctgttgccaccca

SEQ ID NO: 1983 - DNA, 16 bp, synthetic construct
  source 1..16: mol_type = other DNA
gtgatctgttgccacc

SEQ ID NO: 1984 - DNA, 16 bp, synthetic construct
  source 1..16: mol_type = other DNA
ttagtggatggttgat

SEQ ID NO: 1985 - DNA, 16 bp, synthetic construct
  source 1..16: mol_type = other DNA
cttagtggatggttga

SEQ ID NO: 1986 - DNA, 16 bp, synthetic construct
  source 1..16: mol_type = other DNA
ccttagtggatggttg

SEQ ID NO: 1987 - DNA, 16 bp, synthetic construct
  source 1..16: mol_type = other DNA
accttagtggatggtt

SEQ ID NO: 1988 - DNA, 16 bp, synthetic construct
  source 1..16: mol_type = other DNA
taccttagtggatggt

SEQ ID NO: 1989 - DNA, 16 bp, synthetic construct
  source 1..16: mol_type = other DNA
ttaccttagtggatgg

SEQ ID NO: 1990 - DNA, 16 bp, synthetic construct
  source 1..16: mol_type = other DNA
tacattcaggtggtcc

SEQ ID NO: 1991 - DNA, 16 bp, synthetic construct
  source 1..16: mol_type = other DNA
gactgatagaccatac

SEQ ID NO: 1992 - DNA, 16 bp, synthetic construct
  source 1..16: mol_type = other DNA
ttgactgatagaccat

SEQ ID NO: 1993 - DNA, 16 bp, synthetic construct
  source 1..16: mol_type = other DNA
gattgactgatagacc

SEQ ID NO: 1994 - DNA, 16 bp, synthetic construct
  source 1..16: mol_type = other DNA
acctagactgatgtta

SEQ ID NO: 1995 - DNA, 16 bp, synthetic construct
  source 1..16: mol_type = other DNA
gcaactgagctatcct

SEQ ID NO: 1996 - DNA, 16 bp, synthetic construct
  source 1..16: mol_type = other DNA
ggtctattggttaaga

SEQ ID NO: 1997 - DNA, 16 bp, synthetic construct
  source 1..16: mol_type = other DNA
agcttgtgtggaccct

SEQ ID NO: 1998 - DNA, 16 bp, synthetic construct
  source 1..16: mol_type = other DNA
gacttaatccaactgg

SEQ ID NO: 1999 - DNA, 16 bp, synthetic construct
  source 1..16: mol_type = other DNA
gctaaccattatacac

SEQ ID NO: 2000 - DNA, 16 bp, synthetic construct
  source 1..16: mol_type = other DNA
agcccttactgctaac

SEQ ID NO: 2001 - DNA, 16 bp, synthetic construct
  source 1..16: mol_type = other DNA
gagcccttactgctaa

SEQ ID NO: 2002 - DNA, 16 bp, synthetic construct
  source 1..16: mol_type = other DNA
agagcccttactgcta

SEQ ID NO: 2003 - DNA, 16 bp, synthetic construct
  source 1..16: mol_type = other DNA
tggtagacaggcaatc

SEQ ID NO: 2004 - DNA, 16 bp, synthetic construct
  source 1..16: mol_type = other DNA
atgtttagtccaaggc

SEQ ID NO: 2005 - DNA, 16 bp, synthetic construct
  source 1..16: mol_type = other DNA
gtatgtttagtccaag

SEQ ID NO: 2006 - DNA, 16 bp, synthetic construct
  source 1..16: mol_type = other DNA
gagtatgtttagtcca

SEQ ID NO: 2007 - DNA, 16 bp, synthetic construct
  source 1..16: mol_type = other DNA
gggagtatgtttagtc

SEQ ID NO: 2008 - DNA, 16 bp, synthetic construct
  source 1..16: mol_type = other DNA
gattggctgttacctc

SEQ ID NO: 2009 - DNA, 16 bp, synthetic construct
  source 1..16: mol_type = other DNA
aggattggctgttacc

SEQ ID NO: 2010 - DNA, 16 bp, synthetic construct
  source 1..16: mol_type = other DNA
cgctgccacaggattg

SEQ ID NO: 2011 - DNA, 16 bp, synthetic construct
  source 1..16: mol_type = other DNA
ttggtcctgataatcc

SEQ ID NO: 2012 - DNA, 16 bp, synthetic construct
  source 1..16: mol_type = other DNA
cttggtcctgataatc

SEQ ID NO: 2013 - DNA, 16 bp, synthetic construct
  source 1..16: mol_type = other DNA
gaaccctactgctgag

SEQ ID NO: 2014 - DNA, 16 bp, synthetic construct
  source 1..16: mol_type = other DNA
gagtagcattggcagt

SEQ ID NO: 2015 - DNA, 16 bp, synthetic construct
  source 1..16: mol_type = other DNA
gcaattgagacacctc

SEQ ID NO: 2016 - DNA, 16 bp, synthetic construct
  source 1..16: mol_type = other DNA
gcagcagtctaggttc

SEQ ID NO: 2017 - DNA, 16 bp, synthetic construct
  source 1..16: mol_type = other DNA
gcccatgtgaacaacc

SEQ ID NO: 2018 - DNA, 16 bp, synthetic construct
  source 1..16: mol_type = other DNA
tctagcccatgtgaac

SEQ ID NO: 2019 - DNA, 16 bp, synthetic construct
  source 1..16: mol_type = other DNA
gtatcgggtgaggtct

SEQ ID NO: 2020 - DNA, 16 bp, synthetic construct
  source 1..16: mol_type = other DNA
gtgataggctcaacct

SEQ ID NO: 2021 - DNA, 16 bp, synthetic construct
  source 1..16: mol_type = other DNA
atctcagcagcccgtg

SEQ ID NO: 2022 - DNA, 16 bp, synthetic construct
  source 1..16: mol_type = other DNA
ctcagcattacacggt

SEQ ID NO: 2023 - DNA, 16 bp, synthetic construct
  source 1..16: mol_type = other DNA
actcagcattacacgg

SEQ ID NO: 2024 - DNA, 16 bp, synthetic construct
  source 1..16: mol_type = other DNA
gactcagcattacacg

SEQ ID NO: 2025 - DNA, 16 bp, synthetic construct
  source 1..16: mol_type = other DNA
ggactcagcattacac

SEQ ID NO: 2026 - DNA, 16 bp, synthetic construct
  source 1..16: mol_type = other DNA
gtaatctgtactctac

SEQ ID NO: 2027 - DNA, 16 bp, synthetic construct
  source 1..16: mol_type = other DNA
gagtagagcacttagc

SEQ ID NO: 2028 - DNA, 16 bp, synthetic construct
  source 1..16: mol_type = other DNA
ctgcgttaccatgagt

SEQ ID NO: 2029 - DNA, 16 bp, synthetic construct
  source 1..16: mol_type = other DNA
gctgcgttaccatgag

SEQ ID NO: 2030 - DNA, 16 bp, synthetic construct
  source 1..16: mol_type = other DNA
agctgcgttaccatga

SEQ ID NO: 2031 - DNA, 16 bp, synthetic construct
  source 1..16: mol_type = other DNA
gcccacgaccattagg

SEQ ID NO: 2032 - DNA, 16 bp, synthetic construct
  source 1..16: mol_type = other DNA
gattagtaggtcatgc

SEQ ID NO: 2033 - DNA, 16 bp, synthetic construct
  source 1..16: mol_type = other DNA
ggattagtaggtcatg

SEQ ID NO: 2034 - DNA, 16 bp, synthetic construct
  source 1..16: mol_type = other DNA
aggattagtaggtcat

SEQ ID NO: 2035 - DNA, 16 bp, synthetic construct
  source 1..16: mol_type = other DNA
caggattagtaggtca

SEQ ID NO: 2036 - DNA, 16 bp, synthetic construct
  source 1..16: mol_type = other DNA
acaggattagtaggtc

SEQ ID NO: 2037 - DNA, 16 bp, synthetic construct
  source 1..16: mol_type = other DNA
gggttgcactttacag

SEQ ID NO: 2038 - DNA, 16 bp, synthetic construct
  source 1..16: mol_type = other DNA
gccctatcggagttgg

SEQ ID NO: 2039 - DNA, 16 bp, synthetic construct
  source 1..16: mol_type = other DNA
aggtaattgatcccac

SEQ ID NO: 2040 - DNA, 16 bp, synthetic construct
  source 1..16: mol_type = other DNA
ccaggtaattgatccc

SEQ ID NO: 2041 - DNA, 16 bp, synthetic construct
  source 1..16: mol_type = other DNA
ttccgaagtggtaagg

SEQ ID NO: 2042 - DNA, 16 bp, synthetic construct
  source 1..16: mol_type = other DNA
tttccgaagtggtaag

SEQ ID NO: 2043 - DNA, 16 bp, synthetic construct
  source 1..16: mol_type = other DNA
gtttccgaagtggtaa

SEQ ID NO: 2044 - DNA, 16 bp, synthetic construct
  source 1..16: mol_type = other DNA
tgtttccgaagtggta

SEQ ID NO: 2045 - DNA, 16 bp, synthetic construct
  source 1..16: mol_type = other DNA
gtgtttccgaagtggt

SEQ ID NO: 2046 - DNA, 16 bp, synthetic construct
  source 1..16: mol_type = other DNA
ggtgtttccgaagtgg

SEQ ID NO: 2047 - DNA, 16 bp, synthetic construct
  source 1..16: mol_type = other DNA
gactcatcataactac

SEQ ID NO: 2048 - DNA, 16 bp, synthetic construct
  source 1..16: mol_type = other DNA
ggactcatcataacta

SEQ ID NO: 2049 - DNA, 16 bp, synthetic construct
  source 1..16: mol_type = other DNA
cctacaagtgagatcc

SEQ ID NO: 2050 - DNA, 16 bp, synthetic construct
  source 1..16: mol_type = other DNA
gtcctacaagtgagat

SEQ ID NO: 2051 - DNA, 16 bp, synthetic construct
  source 1..16: mol_type = other DNA
ggtcctacaagtgaga

SEQ ID NO: 2052 - DNA, 16 bp, synthetic construct
  source 1..16: mol_type = other DNA
tggtcctacaagtgag

SEQ ID NO: 2053 - DNA, 16 bp, synthetic construct
  source 1..16: mol_type = other DNA
agtgggtcttgtcagc

SEQ ID NO: 2054 - DNA, 16 bp, synthetic construct
  source 1..16: mol_type = other DNA
gagtgggtcttgtcag

SEQ ID NO: 2055 - DNA, 16 bp, synthetic construct
  source 1..16: mol_type = other DNA
gtgctgaatcactatg

SEQ ID NO: 2056 - DNA, 16 bp, synthetic construct
  source 1..16: mol_type = other DNA
aaccatatgcaggatc

SEQ ID NO: 2057 - DNA, 16 bp, synthetic construct
  source 1..16: mol_type = other DNA
cggaatacaagcaatc

SEQ ID NO: 2058 - DNA, 16 bp, synthetic construct
  source 1..16: mol_type = other DNA
gggtatgggttcaaca

SEQ ID NO: 2059 - DNA, 16 bp, synthetic construct
  source 1..16: mol_type = other DNA
agggtatgggttcaac

SEQ ID NO: 2060 - RNA, 3679 nt, Homo sapiens
  source 1..3679: mol_type = genomic RNA
cccctccgggcctctgtagactcagttagtccacagcctgctcacttcgtgggaatagttctccgctgagatagcccctctcgcctaagtattatgtaagttgatttcccttcttttgtttctcttgtttgtgctacggcttgacccagcatgtcccctcaaatgaaagttctccccttgattttctgctcctgaaggcagggtgagttctctcctcaaagaagacttcaaaccatttaactggtttcttaagagccgtcaatcagcctggttttggggatgctatgaaagagagaaggaaaatcatgccgctcagttcctggagacagaagagccgtcatcagtgtctcacttgtgatttttatctggaaaaggaagaaacaccccagcacagcaagctcagccttttagagaaggatatttccaaactgcaaactttgctttgaaaagtttagccctttaaggaatgaaatcatgtagaattttggacttctaaaaacattaaaatcagcttattaatacgggatagagaaagaaatctggtgcctgggggtccctgtgttcacccctagagtttgttttaaaatttttaattgaagcatgtgaagtgtacgtgcagaaaagtgggaacatgatagtgtatggcttggtggattttcacaaactgaacatacctgtgtaatcagcatctagacccagacccagagcatcacaaatatcccccatcctgggcttttcccagaggagatgggggcttctgaagatggacttacctgggacctgccccccatgagccaggacggtccccccacagtcagcctgtgcaaaggccccgtggccaggggtggaggagaatatgtgggtgtggacaggatgggagactgtggcctgaacaggagattttattatatctggagaccctgagagaccctgagacctggggcaccatggctggccaggtcagaagcatcctgactgcagaggtccgtgcagccacaccctcttccctgccagcaagctgtctgcggctcatcggaggcccctccgcctggagccttctatggacgtgatatgcctgtatctgtttttaattttcattcttcacttaggggaagtgaaatcgctcagagatgagatcctttaattgaaaacgaagtgtaacggaatctagtgtctttctaatgtggtaaaattctccatcaacatcacagtcagctggcagctgaacttcagaatctcacttacagcaggcgacacgggggtacaccgatgggtcacactgggtctgggggctccctggagctcctcctgcgtgtggtctggttaggagttgagttgtttgctccagggttattctcctcctcgagtcacagtcacacgaatacctgccttctctggctttcctgctatacacatattcacatggcgctcaagaagttaggctcatggcaacgtgtgtctttctctggacaactggcccagtttacagtgaaatggagaatttcaggtctccacgtctgcccaggaaagaacttcagctgactccacggggatctggaaatccacgaccaatcccgatcggctcttattagctccccgctccacaagacacctgtgctttggaaatccaccaccaatcccgatcggctcttattagctccccgctccacaagacacctgtgatctggaaatctaccaccaatcccgatcggctcttattagctccccgctccacaagacacctgtgacatcctccagggccacaggagcacgtgctgaccagttttcccttccagttcctgcacaaaaagtgtccagagggctgtttgcaaacactagtgcactttgtagcttttcaccctctgtcccagggaatctaggagagatgaggcccgtcagagtcaagagatgtcatccccccagggtctccaaggcatttccacactattggtggcacctggaggacatgcaccaaggcttgccagagccaacaggaagtgagcccagagcatggcacatgagcatcacccgctgatggtggcctgctgtgcctggtgccaacaggggcatcccggcccgtacccctccagacaggaagcatgggtttgcccacagacctgtcgggtgctcctgtgagtggcctccagatgtctttgtgcataggcacaagtgggccagggctggagggaggtgggaaacctcatcatccggtgggccctgccaatcttaacccagaacccttaggtattcctggcagtagccatgacattggagcaccttcctctccagccagaggctgacctgagggccactgtcctcagatgacaccacccaggagcaccctaggtgaggggtgagggcccccttatgtgaacctcttgcctcttcctttctcccatcagagtggttggatggagccattggcctccttttcttcagcgggcccttcaacctctctgcaccatgttgtctggctgaggagctactagaaaagctgagtggagtctcctttccaacaggatgatgcatttgctcaattctcagggctggaatgagccggctggtcccccagaaagctggagtggggtacagagttcagttttcctctctgtttacagctccttgacagtcccacgcccatctggagtgggagctgggagtcagtgttggagaagaaacaacaaaagccaattagaaccactatttttaaaaagtgcttactgtgcacagatactcttcaagcactggacgtggattctctctctagccctcagcacccctgcggtaggagtgccgcctctacccacttgtgatggggtacagaggcacttgctcttctgcatggtgttcaataggctgggagttttatttatctcttcaaactttgtacaagagctcatggcttgtcttgggctttcgtcattaaaccaaaggaaatggaagccattcccctgttgctctccttagtcttggtcatcagaacctcacttggtaccatatagatcaaaagctttgtaaccacaggaaaaaataaactcttccatcccttaaagaatagaatagtttgtccctctcatgggaattgggctgtatgtatattgttcttcctccttagaatttagagatacaagagttctacttagaacttttcatggacacaatttccacaacctttcagatgctgatgtagagctattgggaaagaacttccaaactcaggaagtttgcagagagcagacagctagagataactcgggacccagagttggtcgacagatgttagatgtatcctagcttttagctataaaccactcaaagattcagcccccagatcccacagtcagaactgaatctgcgttgttgggaagccagcagtggccttgggaaggaagccatggctgtggttcagagagggtgggctggcaagccacttccggggaaaactccttccgccccaggtttcttcttctcttaaggagagattgttctcaccaacccgctgccttcatgctgccttcaaagctagatcatgtttgccttgcttagagaattactgcaaatcagccccagtgcttggcgatgcatttacagatttctaggccctcagggttttgtagagtgtgagccctggtgggcagggttggggggtctgtcttctgctggatgctgcttgtaatcc

SEQ ID NO: 2061 - RNA, 1854 nt, Homo sapiens
  source 1..1854: mol_type = genomic RNA
tttttagaggggacacagtggtcgtaattatatttttccttggaatctaaagtaaatgcttcttccaaaatgttaacaacagatgaaacacattaattgtctgtaaatttaaagccaaataaaaagtttaaaataagaaagaaagaaagaaagaaagagaagaatgaataagttttctagaaccacagggagaagcacttgccaatacttctaggagcaaagaaacgcccctgaatcctgctccatccctttctcggggtccttgtctccttggccagggcagggcagcagggggtccacagtcacttagggaggggtttaccgggtcgttgtaaactcccctctcacggtggccaatgcagtgaaggaatccaaaagatacactgggggaaagaaggaaagaggaaaatgtgtcctgagtttttaaatacggttgaagcaaaccccttacatttagggatgccagctatgtgtaccctgtagtgtcagcccgggacatgcaggcactgcactgtggcccacagtcccccctcccagggccaacactgccctctgcagtgactcacgcccgggatagtttaaataccgggacagcttaggcgagccacactcatgctgcagccttgagccgtccctcgtcctcctctcaggctccctcttgtccacggcgggcgggcgccgagctgctggtaagtaggcaagccacccccatccctcctctctgcttagagggcccggccagccccttcccatttctgctggacctgctcccctcggagaccccagaaggggcagagctgacatgtgcctggggatgctctcgggacagggacagaagcagcctgtgctggaggggtgcaagcctgtctccctcactgcctggacaccaggaccaccagcccctctgctgatgcctcaacagcctcttatgccccttgccctgagcggctcatgatgtcaacctggggtgctgagatgtctgagaccagcaagttgggctgaaagtggactaaattatcaccccccttgtcactggattgaccgttctggaatctagatccactgggggaagaacttctctttttaaggttcagattatttgcgcctgtgccatctttcctggcacttgccctggtggctcccagtggtctgccccgcatttggttctgcccaagaccttccttcatgggggtttcccaggcaagagagctgtctgctttgcatagatggataactcctgcaagtgtaacttcagcagatgtgctggtccctggtttgcagttccaatttggaattcggacatgggctcagcattgttcaggctctaacagtgtggcttaggggacactatgctggcagtttcccctctctcctgctggaagcgtcggcctctgtggagcctggaggctttgagcagggagtcagggcaggagatggatttgtgatgaggtggtatgtggatttgaaattgtgacggctgcaccttgacccgtgtctctgctcaaacgtagaggcaggacctggggccaagaaaccaactgtggaaaaccagagctttcaggactctcccacccctgccaaagtgcaagagccattccacctcccgggcccagggcatcacctcggtgcagctgcactctctctgagatgacacgtgtgctccagtcgcaggtgccaggtgcctgtctgccacgtgccagcttctcctttggggttatctgggatgcgtcactttaccttgggcagctctcagatgtgttgctgccactggctccttaatttagaagtgctctaacggctggcacttccttcattctgcagagactgaacatctggagtaaattcagggccaga

SEQ ID NO: 2062 - RNA, 67625 nt, Homo sapiens
  source 1..67625: mol_type = genomic RNA
taaagccagaattctcctgccaggattccatcaggagttacctgctggctcgatgtcccagtctgtgcttaaagcaggatgagaaagctttgccacaggaaatgagataatgcatgtacaaactcatttatcttctcaggaaaatacattactttaagttgtatctttatgctctacacattttaacagacacacagcagttacccttggtttttcttctttactgtcactgattcacaatcataattaaaaatgccaaacgcatctttatgtgaaacaaaataatttttttcttatttttatagacaaaaccgtccaaaatgacatatttttctccaggaaagacagcatgttggtgtaggaaacagagttagtgtgctatggagttagaagacctggatttcaccatttaaaagccatgtgaacttgagccagtccctgaacctgtttattcatctattaaatgaaaaataggaatctctctaattcatgaaaactttgagaagattaaattagacaagatgaatgaaaagaattccaaatatacaaatcacatgcaaacaagtcttggcttattagtctactgggagcagattactactttgaatcttaatgccctctctttcaggttaatatgcaaaaatacacacaaaacacttaaaatgtaaaaagaggtagtgacatcacttgctgacttaagtctgaactcaaattggttaacctgcctatatatggaaaaatttccatttaaatgaaaatatttcactagcccacaaacagccttagacgtggtttcctgtttacctttaaatggatgttgtggtttcttcttaatgattggaggaagttccaaattttggtgaaatgatctcatttaaacatagagcaggatatgagaaagaatgattaacttgtggttccgattgatgttgtatattttacacacagctggataagtctattgtaataattaaaaatttatttcactaattttttattttcatgaatattaattattatgtcctaagcattgttgtagagattaataatgacaataatgaagaagatattgtccttgctttcaaggagttgttaatttagtttagaaaataggcaaggaaatcagtgattgcagtataaagtggtaactgtctttagaagttggtgtgatctgtttgatattagatgtttcttggctgctacttctggagtaatttttaacggtgctatgtaagaattccattgttcacataagtatgcaatggaaggtctacttttcagctcagattcatttattgtttctcaccctctttccacaacccagaaggtacttagtgagtctccttaagtgacaaatagtatttgactctttccattagaattactcatgatttcttttcccttgtctaatattcacaagatttctgctagaacagagagaatacagtcctcagaaatacaaacacaaattatttagtttagttaaattataaggctgcagcattgcatacacacaggcagtattttgttgagtaaaatggcaggaagccaaaacttttatagaaacccgctgataattcaacacttaaaaactatgatttaaaaatgtacaagtgaaagatgatttcttagaaatgcagtaatcttttagcaaccatatcaatgctgatagcaggggacaagagggtcacaaagagattccagaaaagaataggttctttgtcttgcttactctgggttagttattaccagttttctggtaaggaagaattagaggtaaatatcagaacttactaaacataccataggtcactgtttagtggccactattttcacaggggtatgtgaaaaatgtaactccttcccttttcttgcatatcaatttgagctcacttagccagccctctttctgctagatagtaggaaactttatctagataattccaggtgagcctagacatcatccaatgtttcaccaagtgtttttttttaattcccatttctctgtccttttcttcatgaaatcatctaagattggctaggggcggtggctcacgcctgtaatcccagcactttgggaggccgaggtgggcggatcacgaggtcaggagatcaagacgatcctggctaacacggtgaaaccctgtctctactaaaaatacaaaaaattagctgggcatggtggcagatgcctgtagtcccagccactcgggagtctgaggcaggagaatggcatgaacccgggaggtggagcttgcaatgagtgaagattgggccactgtactccagtctgggcgacagagcaagactccatctcaaaaaaaaaaaaaaaaaaaaaaaaaagaaagcatctaagatctccagctttggcagaactatcaatccatgttggcacctgtccagatgcctgtgtttgcctgtctgagctctgctcctggtgacatggcctctccagatctacagattgtttcttagctagtatcaggctcctttgctattttacttggcactttaagatgggactgtggaagattctctgggctacaggccagctggccaggctcccctgcagccattctgtccccactttaccagggaggtaggagaaactttggcaaggttgccacccttacagtccggacaggcagactgtacacttcttctactctgggactcctctaaatctatctttcagtagagatctgcctggggcacctaaaaggtgccctccaccttctaggacctaagtgtttttaggtagttttggggtagaaggtggtgataaaaaattcccatgttatcacattttccttcaaatattactatgatacagctagactgtgctttcaaaatgaaaatctgcgaattttatgtctcgtttgtcccctgattctgcacaccttggggttaatggaagacttatatttagttctgtcaggtagtatgaaaaaacatggtactgtgaagagaagcagcttttctttacaacgtgcatggtgattcttgagaattctgctgttgtcttcataaatttctggggttagtaatgcctccaggtgtctttgcaggtaaatatgtctactaggtttcctttcagatgcagctttaatgcttagggctggtaaagctggtaagaactattcttggagaattccatctaacagtttatctgtgtctagagtagtaacagttgcttatgtgaagagaacaaagaattacagaagaggaattatgttaacattttacttcagagacaggtttaatttattttactacatgagcccctttagatacggagctgatagtaatttcttgctgaaagaactaaaacgaccacttcattggaaactcattaaggaaaatgcctgtgtattataacatcaccttagtccttacttgtagaagagcacataatagtcccttaaattttattgaatgagtagaatttcaggctacaatgtaccaacttgccctataaattttgtcaggtaatgttggtatatttttcaaacacatttcttaggactatcaaaaaaaagcagagacagaaattaaagtggtaaagggaaattttattcaggactattgcaataggggaagagagacccccatatagaactgggcttcattctaaatacatcagggataagtagggatttatagccaaagagcagggatcagaaaatttttatgtatttatttatttatttatttattattattatactttaagttttagggtacatgtgcacaatgtgcaggttagttacatatgtatacaagtgccatgctggtgcgctgcacccactaactcatcatctagcattaggtatatttcccaatgctatccctcccccctccccccaccccacaacagtccccagagtgtgatattccccttcctgtgtccatgtgttctcattgttcaattcccacctatgagtgagaatatgcggtgtttggtttttttgtccttgcgatagtttactgagaatgatgatttccaatttcatccatgtatctaattaaactaaagagcttctgcacagcaaaagaaactaccatcagagtgaacaggcaacctacaaaatgggagaaaattttcgcaacctactcatctgacaaatggctaatatccacaatctacaatgaactcaaacaaatttacaagaaaaaaacaaacaaccccatcaaaaagtgggtgaaggacatgaacagacacttctcaaaagaagacatttatgcagccaaaaaacacatgaaaaaaatgctcagaaaatttttaagaagagataccaagtctgggggaaattctggcagaaccaacctaacaggattcctgctgaaaacaggcgagggtgatcagctaacaggagtgggcagagaaaaattttgatcagatactgagggtgatcagatatcaaggatgaataattcttgctaaactgtgttggccgtattatttgctaaaactgggttttagaatgatgtgcacagacaggcccaggagaaagtccagaagcctgactaaagtttggccaagcaaagaactgttgttagaatacagtcccacaagaagccaaatgacaaaataaatatatatatatataaacaacagaagaagagcttctggcaagtaagtttgagaaatagctgtatatcacatgcacctttgaaagtgtattttaaataacattataccaaaatttcttcatttgttctttctgtatctactctattaatatgctgctttattctttttctcatttattaaacattaggatttaatatactaacttcttttctattattaataactgatcatcatgacactcatgattaattaaatgtttcattacataagaatggcattggggcaatatggaaaaaagaggtaggttttatttatctatagatatttattttattttatttttttttgagtgaaattctgctttattttataattagaaagggccaagctttctcctggttcagcaaaccatctctgatgagcaggttaggggcaggttaccagactacccaccattcccttttgtcagatgctcagactgctcaaccgtaagggttggtcctgcctcagaacccactctggtcatagagatcacaaactagggtccatctgtcagtcctgacatttctctaggggaaggtggaaggagagaattagagatgtctctagttgcagaattatggcctgcagtgggtcaaaggaacatgactaagacctcacaaaagacaagattctatcttgtggtgaggggtgtggttgggggtaggaattaatcagagtgaagcattcttgcctagaggtaaagctctcctttttcttttctttttttttttttttttgttttctttcttttatttaatttatgtgatgaaacctggtcaaattttgggctgagttttttttttttagttgatcattcttgggtgtttctggcagagggggatttggcagggtcataggacaatagtggagggaaggtcagcagataaacaagtgaacaaaggtctctggttttcctaggcagaggaccctgcggccttccgcagtgtttgtgtccctggatacttgagattagggagtggtgatgactcttaacgagcatgctgccttcaagcatctgtttaacaaagcacatcttgcaccgcccttaatccatttaaccctgagtggacacagcacatgtttcagagagcatagggctgggggcaaggtcatagatcaacagcatcccaaggcagaagaatctttcttagtacagaacaaaaatggagtctcccatgtctacttctttctacacagacacagaaacaatctgatttctctatcctttccccacatttcccccttttctattccacaaaaccgccatcgtcatcatggcccgttctcaatgagctgctgggtacacctcccagacggggtggcagccgggaagaggggctcctcagttcccagcaggggcggctggccgggcgggggctgccccccacctccctcccagacggggcggctgctgggcagagacgctcctcacttcccagacagggcggctgccgggcagaggggctcctcacttatcagacggggtggctgccgggcggaggggctcctcacttctcagattgggcggctgctgggcggaggggctcctcacttctcagatgaggtggccggcagagatgctcctcacctcccagatggagtcgtggccgggcagaggcgctcctcacatcccagacggggcggcagggcagaggcgctccccacatctcagacgatgggcggccgggcagagacgctcctcgcttcctagacgggatggcagccggaaagaggcgctcctcacttcccagactgggcagccgggcagagggtctcctcacatcccagacgatgggcggccaggcagagacgctcctcacttcccagatggggcggcggccgggcagaggctgcaatctcgacactttgggaggctaacgcaggcggctgggaggtggaggttgtagctagccgagatcacgccactgcactccagcctgggcaacattgagcaatgagtgaacgagactccgtctgcaatcccggcgcctcgggaggccgaggctggcagatcactcgcggttaggagctggagaccagcccagccaacacagcgaaacctcgtctccaccaaaaaaatatgaaaaccagtcaggcgtggtggcacgtgcctgcaatggcaggcacttggcaggctgaggcaggagaatcaggcagggaggttgcagtgagccgagatggcagcagtacagtccagcttcggctcggcattagagggagaccgtgaggagagggagactgtggggagagggagagggagagggagagcatctatagatatttcaattgtactggctcttgatatttttagtaagagttttcatgtgaggaagtactcaagtttgaaaaaacctctttataaatccaaagacttagaaggagtttctaatacataatacaaatgccaacaattaagcaattcgaggaattttcttactgaccttcctatttatttaaaattaatataaaaattagtcttcctgatttcttcatggctgtgcttgattgcataaagttgcttttacctggccatcttttaacattttgttttttatttggagttgctaaattaaaggaaggaagctgtcacaaattgctaaaaataatacattgaactataaatatgaatcatttagattccagtatatttatttatataccaccctttttctgaaataatttgaagaagcttattactttatgtacagaattttttttatgaagaccataatgagtacagtgaacacagctgtaattactattccagccctgaaagccactgtgatgaagtcatggaattatgatctcttctaagcttataattgtgagcaaacatatgtacaagtttatattactgcagtgggatcctcagaaagaatcacattctggaaacatttaagacaaaataagcctttctgatctgctaataaagtaaacaatcttgatttaaaaagaataaatcatgtgttagggacaaaaatgtgaagttctttgtgtgagatcacagctcagtgctctcttcaaaaacaaaaagtcatgcagttgtttttattgtttaaatataaataattcacgttccaaaaatgtctcctcaggctaactcagtatcattttaaggtatttttttttaagtttacacttgacctgaatcttgtctctcaagcagacaggacatgttttctagaataattggcacattaataattagccaaccctggggcacagggaggaaagaaaacatttcagggctattagacaccaaacaccactttcaaacggggctgtacctggtgagaaagggggatggccatccaagtgtccacacttggagattctgcaaagaggcttccccttgcaatgattctttatgcagcccatatttttctgtgagaagtggcaagacagaaatgaaagctgtgaattgatctgcctgcttagtaagccaagcttataaaagaaaaaaatttgctcaagtttcctgaccttgtcaccttgtttaagagactgaaagaacctgacctttccttctaccattttgtctgcttctgcaacttggcatgaattgtgatttggaatagagttaaaatctcttttggtgttagacttattcaaggaaaaatatatccaaggatatataattctgaacttccaagaaaaaatcctaaatgcagcaagtaatgcattttaaaggaaacgtgaaagtataatttgtgttaaattgttaaagggttttaaaacattaaaattcatttattaaaataacttgcattttacatgtattgtagaaaacctgaaaactctagaaaaatataaagtaaaacaaaagcatccatacttttgttatccaaaaaatgctattaatcttttagtgtttttcctaaatatatataataacaggcactacatttaaacataatttttatacattcaatagttttgtctatggccatgataatcttagaatatccgaaagagccagcataatctgtaaagttgctgagtgtctataataatatagaataaatgacatcaagaaatatattggctcaggggatatctgcattatttaaaactccttcgaacaaccatgtgaatgagcttggaagctgattccccctcagtccagccttcagatgaggcctcagccttggctagctgcttgactgtaaccttatgaaagacccccaagctggaggcatccagctaagccacatctggaattctcaacacacagaaacagtgacataatgtttgtcattttcaaccactgagctttgaaataatttgttatggaacaataggtaattaggttatagcatacaataattaaatggactttggtcattacacaagctatgccactcagtttactacaatgttcatcaaatcacttaacttctctggtttgtagtttgcttacttgtgggatttggccagattagtgcttctcagtcttcagtcatttatttattaatattttctatacctacttgcaaattgtagtgttatttactgaattcttcaagttttattatgatgcaaaaattacttgaagctaattgggccattcagcaaacatgtcttcagtaaatattggtagtcttccagtagttatatgttggtgaaggatattttcctctttctgacaacttgtttttatcagatgatatattacagtgagtgaaagtctcagactaaattctgtcaaatgtatgaacatttactgtatttcaccaaaactaagatatcatctacttcaagatacaccataatattatggaacagcaagggtgaaagaaacactgcaaatcataattagaaaatgtaagacatatccaattccagatatgttaaaatgtgagaaaaaagtgtgtgctttaagattaaagaaataagatattagcaactaagcaccaaaatatgtcatcatccattctattcagtacttttgaagttacacttttgacctaaggacacgagccctagcaagaaagtttactccaagaggggtatcccacagttctgatgccagaaacagccgtctttgtaatgagatcaggctataatgttctccatgcaatggaagaatgggggaagaattggctctcatcttaagtgctcctgatcttgtgtgctacacttggcttctcagggtttatgcaagggtggtggagtcttcacagtattcccaactcacctattttaaagaacacacatttaagccaataaagattatttctaacataccttatgctaattagcaaagcctttggtacagctttgattatggacatgctatcttttaagtgtagttctccttagatgttgagtcctgattagtacttcaaatattaattaatcattcctgatatatagattagaaacaagtacttcaaaatacacatcctgctgtttataatgaagcattttaaactaaatgatcacatctagtataaaaacacttattttttccaaagtacacttatatagttaggaaactacaagttactactgtaaatgggaagtgagcaatagtgctataaatataatagaagccacctgtaaaaaggaacacatacatcaaaacaatgcttggtgccattgcctagttaaggttctaaacttgaggccagctctccctttgttaaagaaggtaagtaattgagatttgtttccttgaattaatcagaggaaaaaaaaacaaggcagtcattttcttgtaatgttactccaaattatttaatgctctgtaagtgtaccaccagggtctgggtcctgtactttgtgaaaaactagattacatgatttcaaagtctctgacaggtctaatattttttgagatacaatttttcttgtgcttcttttgtaaagctgtgggtggaaatgcatgtcatttcagaaaatagtgcataggtcattggcatcttacacagatttgttgctgtgaatccttgaaccaggaaagtatttatttttctaattagctcattaataaatgagaacattataaacaattgtgtattttttcctcatggtgctcatattatgcacttataatatgaaagacttttaggcaatattaaaatgtagactcaagccttcttgttttagaatcagtaacaacaatacaacaacaaataacttatttgtctgacaggcaccaggctttaataagcattttccacccccgcattctacctgccagtgatgatactgcagcatctgctatgatttgatttttggtaccactttgtctttatttctggatatagagcttacattcttcattggataagtacttccaagtggaccttacatagcaatcacaatgtcagataagctaaaaaagcctgttctgataaccaatagtttggttttctatcatcttggaaacattctttggcagggtatctgcattctttttgacttattgcagaagagaaccattctctaagtaactcttacaggaaaatgagaaaaaatgttttatgacttccaagagtgaagtaagttctggaatcagtcacctgtgaacaaatgttagccatacatttctaatagtgggatagggagttcagggacaaatgcttgaccatttcttatgtttttcctcatttgttttaaagcttatcctcaacgacacgttttattagcctgactaaaagtttgagagggatacctattttaattcttttttaaaattgtctagcagtctagctgaatttcttttatacagtttgaccaagaactaagaagcccaagtatcagtatctctattacagagtttatcaattggtgtctcctgccaaaaattctgatctccaatagtcttatattttattttaatattaacttcaatatttcagttaacttgaaaacttctgatatttaatatcaaaactagtttttttgcttatcttaaatattatagtaatcatcccacaagtggttttttctagtaccctaacaacattaataactaaaagtgtgttgtattatagacaagatttaaaagcacaattacaactgaaagtaaattagcaattacttgttgaaagtgtctttaatgctgttctgactccctagtagcacttattcacttctttttattgattttctatgcttccaaactttgcttccatttatcaatatttaaatatgctatgtctcactctcatgggggctaatgttgtagtttaaccatctgcaaggtatttcttattgacagctaacagctactattttcctcaaaggcaacaatgctaattaacaactgtcttttatccaatccagagcagtgactgacagtgacagttttggcactgaggcaggaaagtgaaaaaaagatttttgttataatttgtattttttttttggtatgcgtcaaaccacaccatgcagatagctatgtatggcatagatttctatctaaaggagagtataattttcatatagttatgcttttggttcactctgctaacaaagcttttcctttcaaaagaataggtttctcactgaggtatggacatgccaagtccgaaatttaaaatctaaaacattctgtattatctgagaacaaataaagctttggaaaaatttatctgatgcaaaattactagactgtttttttcatggtgcccaaatatatttttctttaaacatttatcaactaatcattttgtagttttagaaaaatcaacatttatttagaagaacatataggctattaaaaccagtcatgacaggaatgataatcttggaaggtgatatgcatatccattccagtggttttaatgctgccacaaatgtttgatttttatttatttatttatttattttttatttaagttatagggtacatgtgcacaacatgcaggtttgttacatatgtatacatgtgccacgttggtgtgctgcacccattaactcgtcatttacattaggtatatctcctaatgctttccctcccccctccccctaccccacgacaggccccggtgtgtgatgttccccttcctgtgtccaagtgttctcattgttcaattccaacctatgagtgagaatatgcggtgtttggttttttgtccttgcaataatttgctgagaatgatggtttccagcttcatccatgtccctacaaaggacatgaactcatccttttttatagctgcaaagtattccatggtgtatatgtgccacattttcttaatccagtctatcattgatggacatttgggctggtttcaagtctttgctattgtgaatagtgctgcaataaacatatgtgtgcatgtgcctttatagcagcatgatttataatcctttgggtatatacccagtaatgggatggctgggtcaaatggtatttctagttctagatccttgaggaattgccacactgacttccacaatggttgaagtagtttacagtcccaccagcagtgtaaaagtgttcctatttctccacatcctctccagcacctgttgtttcctgactttttaatgatcgccattctaactaattaaatgaaacagcttctgcacagcaaaagaaactaccatcagagtgaacaggcaacctacagaatgggagaaaatttttgcaatctactcatctgacaaagggctaatatccagaatcaacaaagaactcaaacaaatttacaagaataaaacaaacaaccccatcaaaaagtgggcaaaggatatgaacagacacttctcaaaagaagacatgtatgcgtccaacagacacatgaaaacatgctcatcatcactggccatcagagaaatgcaaatcaaaaccacagtgagataccatttcacaaatgtttgatttttgcaatccatgtgatttgtttagctcacattttttcttgattcttacattgagaaatgcaacgggtaaacattgaaacctgtacaaatggtaccagcttgacaactgcatggttttatatgcaaaaacaatggattgttgggtatttatagattgcattccaggtatgcagttacatttattaatgcacagtatttgtgtttttaactaaatgttttaagtggtttttaacttttatttcacttgtccagtgacttctgttggttttgaagtataaccaatgaatgtattcaggatggaggggccttactgagggttagaacagatgctgtaaagatctagttagcaacatggatcctacagtcaagcaacctaactctgtctccactattctcttatgagagtcatttgacttcagcaggcttagcttataaactgggattataaaagacctgactgtgataatcagatacgtaaagcaaataacactgtgtctggcatatagaaggtgcacaactaatgctaagttttacatagtttttaatcttagggaattaaattgtccaggagatgttcaggattggagggatggtggttagtatagtgctagataaaattaatggtaataatttgttgtattgacatgaattctgtatatattttcttaggccgatttactctttcagaaatgttttattattttagcaagaccggattaaggtatagtgatgcagtggaaagagcactgggccttagaataaggggatttcctttctagccttggctttgccatttattttctggaaatgagagtggcccagtgaaaggtccatggggacatttgacataggatgggacaactgacctagtgagcttatctgtttacctctctttttcacctctgttggtctgtatctttcagtgtcagaaaaatacaggtataactctgcaacaagggacatttaattagcaagcctcccttgttagaacctcgctaaattaattattgatcttgttttagtatagattcttccctgttgccatgccacaataattgcagcaaagttgtggttagctggctctcggacactttggaactgctctccagcttttaaagttgaataaatgacatataagagctttccactctccttaagttccactgtatttttactcagacacaacagtggccatttggggccagagagccacaaatgctcctgaaattatacggttctccaaaagcaaaataaaacaaaattttaaaattagcaaaccgtcttcttccacccaccccccaaacaattctgaaagccatgttaaaatgtaccctgtaagccttcctataagccttagttcttcagttgccttccttcaggcaagagaggtgtcccacatggggtctgagctttaacaccacagattccatgaaacctgttctttgattatctcctctttaaggaatgggaatatgatgttggattcagggtacctgtctcactcttattgccacatctcaaacactttcttcatttgagtgactcccagaggcagtcctttaaatcttgatgcattatatgccagcctccctgggccttatgggggtcccaattcacatctggttatctttgacctttatcttggaattcttccttctttttaattcatcccacacttcttaaaatgttaaacggctaatgttgtatgtttcatgaaaacattctaatgggactgatgatattcacctattattggagaatgtgtcatttttgtcagtgacctttttaggagagtgccagtgtgtttgctttctttcttttttttttttgtattttgcaatcccgtggtattaatttttaagttttaaattgaagtacattatacaaacctacaagaagggtacagcttaataaggaagatcacatccatgtaatcgctaccctgatcaagaggttggccacctcttttatcaattatccacttttgaccagaaatatagttagagtctcacctggttgaacaactgaatccaaattatcttgaataatgagaatttctagtgttgtaacttgaggctttgcccatggctttgttttattaaacatgtttattgatgacttagataaggccatggaaggcaagcttatcaaacttacgattgaggcagagggaaaaaggaagtctccctttgctttctaattgcagagattgtcctcttctccctccacttcactattattcttctttttagttcaggaagtggggaggcagagaaaatgagagataatatttcttctaatggcattttagggatagtcaactatttgcctattaaaagctcgttcttcttaacagtcattttgtgtcttttactcttttgtatgattataagattctttgtgaggatgagccagttttataaagattcccagggggtacagcattggcgattcattctaagagaaaataaatgaaattgacttgggagagtattacattttttcctaatttgagaaaactcccagaagcagttctgtttcctaatacctggattccacatttatggtaaatttagcatctttctggccctgcttgtccttattcccctgcttttaatgtctcccatgcagatgacactcccaaatagatgttctgggtctgcactgaaatttctacctagcagctcttggctgctgcagttgcttgtttctcagcaaaagtttctcccggagtagaggaaggctgtattccatcacctgggaaggtcttttcatcacctttgctcttgttattttttgttcagttccaaaataatttatttctgttgctgccaccactctgactacctccgatatcagagaaaaggacccatgtcttctagaagacataagattttatttctcttgatatgcagaaatcagagaccatatgttattaatttttaaattccaattccactaatagtaattaatacatggtgaataaataaatagaagtcccaatgttgctgaatacacattttagacactatccaattctctaataaataagaagaaataagacttttactaattcattcatttctttttatgttcattttataaattccacttatagttatcttcactaatagatgagaatagaaaccataaattcattaatatgcaactgaccagcccatttcacttggaatgcattttgagtttacaggcagattcatatatatctaaagcctaagcactactaataaattaaaaagccaggatatctaccaatttaggaggaactgggaatatgtccagtttttttcttctatttttctttctctctctctctgcacactatacatgggcatcttggtcagtcttattctaaagcaaagaatgagcagaagtgccctctcagacctttcctggaaaaatagtcatttaaatgtctggagttaaaggccttctttgtatagtatacagaaagtaattagactcaaaaccctttagacaatcaatgcaggtattaaatgcattacatatcaggagtattagggagataaaaatagagccaaatcttatgatggaggaggccaacaatctcccatagaaaaaaactacatgccagacagtagatttttttgccaagacagtctcctatgtggcacagactatgaaagctatggtccttcagaggaagtataggtaatttaaccagggagtaaagatgagtgactagtggatggggaaccactgaaattaaaaaaatatatatttataagacaactagagagctactgtcagagaaaccagctagaaagtacattcagtaagagaaaaatgtgtggtaaaaagcccttgaatagactcataatcagggctggcttcatgggcctgagacctatggagtcacacaagattccacactagaagggccccatacttcatttaatactctgctgtagctatctttaaattctgaataatttctaaatagaaaactcaacattttcattttatactgggccctacaaattaagtagcttgttctgctggtcatatggaaattaatgaaggtgacatgaaacaagagcatgagaaaggatgaagggttgtggctgtatgaccagagagtaaaaatctatagggtggtaaattagaattcccacattacagacaattcaggaagaataggattgaggactactctgagcaggcaatctttttggaactattgtgttggagtattgaaggccagaggcatgtaacagggtccaaatatgcatgaaaaaaaatggcgaagaccaagtctcaagttagaagctagttagcctaggaaggcatgcattccaggtattgggacagagaaaaatgggcagcctaaaatcaagtcacaggacaagtggtttgtaagaggagaagaaagaaagaaggctgaagaggcctcagcaatgggcataatgccaagcctagtgactgcggtcattgtgtttcacagaaatttgtaagaaaatctaccttttgtggaaagatgatgaacagtttttagtttgcatggtggtggtgttcaagcaaaaaatgtccaagatgtaattggagaaaagaatatggagctgctagaagagctcaggcacagagacagatttaacagtgagagctaacatttgttggaggctcaccttgcaccacacaccatgtcgcattcttctcttgtggtagaaaaaacaccagatggtatataacatcctttcagaggaaaaggtaatgtcttataagaggagaagggcttgtgaaagctagacttacaagaaaccttgttattaaaatttgggtctatatttaagccccttccttcactcactcaaaaaatacttactcaagatattactactcttgtgtttaagatgttcattttagctattgctttttatgtgtgagagttgagatatcaagatgacagagaaacaagatacagtgaggttgccattataaactttagaaataaataaaagaaattagccccataagtttcagaaactcaaattaagcttaatgacagatagattagtcaaggtatactagggggtagtagatatttttcatttctgcacaatcaaaaatgttgaacatcttccctatgtgctagtaatgtatgaggtccaaattcttaaggtagaaaaccagaaaattagaaatttcagcctctggtaagctaggagtgaccatgtgctctggtgggagtccctgggaagacccattctctcaaataaaatttcaaaaagagaagggttttacactttgccctttagctattctttattctgttctgcctgaaaatcagatatattgcctttcagggtctcaccaaacctaagaggtgcaacattctctttattatgacaaatgctcttctatgctaagtgtggtagaacagggaagatggaggtaacttaggtcctagatggcatccttacttcagctctggacatcacggaatttgaaaaaaagaaaaagcaaacaaacaaacaaaaaatgaagctgctgttgtttgagttttctgttctttgtatcccaatgaataatttctggttaatcaatggggcatatcacagaatctgagggcaattatgtgattagttctcaagagcatccaggactccagtgaaatcaggactctgtctctccatttccacttttctttctactttggcttcattctttagttgcagtagagtagcttttgtggttgaaaacatggcaactcacacctcccagttttatgtattagagctcctgccaccagatgacttctttgatttcaggtctccaaatccagaaaaatggtttccttgtcatggcttaggtcagatttcatttcagtatcaatcaattttggccagaaggttgaagtcttttaagaatttaatcattcccagaaaaagtatatatagatggagaaagggctgaggaagctctcaaaagaaggcattggaactaggggcattctgggtacataaaacaatagccctcaattatgatttgtattacacaggagcaaactgtattgtgagtctgattgcccactatgaactacacattttacacagttaagagaaagagtaatcctctcatctttttttttaatttttaatttttgtggcttatttttagtacccagccttaatagagttgagcaaaatagagattacgtttccatgacataataaattttggtaatttcagaaagcaaaaaatactggaatcttttcaatccaagtcgattggatacatagcagttcaatttgaacacagcagttcaatttatttgttaacaaattctgcagtgtcttcctgtaagaatctgtaaaaatcctcatcagcatttgaagatgcaccccctcacttttgtaattggttaacagaagcttctatcttttcacatccctttagtgatctcactgtttactcttcaagctgtatagtggcagctgtttatatgcttgcatacacatggtttattggaatgttctcttcaaattgaaattatttatgtttcaaaatttatatacacatactatctatgaaaaatcctgcacaattgtgtattttttttgctgtggatactgcataaataaaatttaaaataagaaagatgtttctcttctttacattattactctatctaagcctactgatattagttaaacattgttattttctggcaacgatgtctttgatgtgtgacacattcttgctggaatccagcctgtggctgattgtattttctagaaagggctgcactaatacatagcccatcccacccacatgctcttcttgcaatgtgacaacaataaatgacattgtctaacctatgttgggaatgatagtctctgtctttgaatctggttggagttttgtaaatgcttggaccaatagaatgtgacagaaataatgctgtgtgccttctgagactacatcataaaagatgatgtggcttcttccttggtctttcttgggatgtttacctttgggatctggctactaatttgtggggaaggctaggcaacatggagcggccatgtatagctcttccaggctacagctgcagctaaattctcagctgacagccaacatcatgtgtcggacatgtgagtaaatgatctcattttattccagacctcagccttcaagttttctagctgaggctaggttatttcgtgccacttgctctgggggtattttttttttctcttaatacaaccataataatggaacagagtccattctgtttctgaaagacacttaagtgtaaaaatagtaaaaataaattatctctttctaataacattacatcctatataaaatagaaagcctttattcagattacaatgagctattctaaaggggaatgtttagatatagctttggcttgctaactattaaattataaaaaattatctcagcgatcattttctatgcatttagcatgtcagagttcaaataatctaagaaaaatacataggagaaacaagacctgaggagatgttcctgtgatggaacactgaaacaggatactgatggagacagggttctctaaaattatttgaaaataaaccaggtttaatatcctgcatagaaaaaagagccataaaatatggcttctatcactgtactacactgtgttttttaattttttagaagagttatttaaattgctaatttaagactttaaaatttataaaattttaaattttatttgtgaggtgtttagtttgctttctgaagaatttcttaattagcatgtcatgctatgtaggacactttagtatccctgagactgaagcagattttcacatttggattcttatctagccataattttttggattgttttcatattaagctttacattttcgaatatttgttgctgcatatgtcaaataattagagtcttttactacctttgagactctaatacaaatgaagaatctaaacaagcaattaaacaatagcaggatattcagctggaaacaattaagtactgccgattagaagctcaatcctctagaataaactcttacactaagagcaaagtttatagccactctacaatttatttaacacttcccatctccttcatttataaaccacatatgtatattttctttctttcttttttgagactgtctcactctgtagctcaagctggagggcagtggtgtgatcacggctcgcttcaggctcaacctcccaggctcctgatcctcctgcttcagcctcttgagtagctgtgactacaagtgtgcaccaccatgcctgcctaattttttattgttatttttgtagagacagggtcttgctatgttgcccaggttgatctcgaactcctgggctcaagcaatcctcctgcctcagcctctcaaagtgctgggattacctgcatgagtcactgtgcccagccccatatattttcttggtaaatgtgcaatactcaggtttcctttctgtctatcagccactggatgcttgatttagttatacagagaattgcactggcaagctgttcaaaacctcttcttaacttttttaaagcaaaggcaaacagaaaaagtaggcgagacaaggggaaaaagaaaaaaaatctctcaggaaaacttctgaaggtaaaaaccactctgggtcacaggctttggtcacaacagctcagttagggacttgttctttctttctatcccttcacacaccaggggcaacattcttcctgggacttactatgcgccacaagaaactcattattcgccttcaccaaaatttaaactcttcccctttctgcatttcctgcttcaattataactcaacctactaatcaaatggccaaactagggataatcttaggcccttcctttttctccactatcaatctaatttctttccaaatcctgctgacctatctctgtaatcgtttatcaaatctgcttcttcccatctctgcttgccactgccctagcctgatctagatacttgtagcatttgattggctatgttactggtcctgctctcttagatatgtctctactctgacatcagaggaatgtatataaaatgcaaatcagatgctgtcaacccactgcttaaaaatcattcaaagcattccattgcctacaagataaagtaaaatctatttacgtgacatgctggaatttctgtagccctgtttgtctctctgtgtccatcttttaagtatccttttggctcttctttttccttttcttaacttagtatcctacatggatgctgaatttcctgtgactccctcaagcaccttgagttttctgtctttgtgcatttctttgttttcattccagctcaggcaacacctgtttcaggaatgcttcacttctattctctgccaaaattttcactgaccatttctttcatagtgcttactttattataatgatattttgtattctttatattttgtttagatgttgtcttcctgattaggaatgtccttaatttttggagccatgacaaatatttttaaatgatgccatggctttgtttgtattgtgatttacataagatttctcatttacatagttatcaatgatgtaactaaatccatgctgatatgctttataaacaacctgttagaatccatcatgactcaaaccaaagttgagcccaatttcatggaattttcttcaccttttttataggaaacttttgtctccctttcttatttctgtgagaaccatggcaaattgtaaatctttatacaatcagtacaaatactacacagtccataactatttgttgacctgaagtaaaccagattaataaagcatacactctggattgaataatcataaagtccttaaccaaactcatttcctgagcctggttattagaatctaagcatccaataaaggcttgcttcatctaactgaacaggcatagattaattctttatttcttaaaaataaacaaaaatgcattttatttttagcaagatagttttcaccaattgggctagaacaatttttgaaagtgaagataagaacttcaaagcccccacagcctctaccatctgcattagtttcctattgctgttgtaacagctaaacatttagtagcttaaaactccacagatttattatcatatagttctggaggtcagaagtctgaaatgggtccacagggctacatttcttctggaggctgtaagggagaattgcttcttgacttttctagcttctggctgctgccttactctttggcttgtggacagggagatgcatcctcacatctattctgattctgactttcccaactccctcttttctctattagggacccttgtgattatgtttggctcacctagataatgcagtaatcctcctatcttgttatctttaactgaatcacatcagcaaaacgtctcctttgccatataaagtaacatattcacaggttctggggattggatttctttgggaagccattattctacctaccataccatccatttatattgctatgcatgacatcttttgtttttcaactgagaaacaactgtacatatgggtttggatgagaaactgagcgattgagaaaaagtataggaaatggagtagattattgtattccattaaacccagagggtatttaagctcctaaatttgggaaagaatggtccttaactggaggatattaattgttgttgatttgttttgaaactgggtaatttataaaaaatgaaatttatttcttacagttctggaatctgggaagtccaaggttgagagcgtttatctggcaagagctttcttgttggtggggatcctctgcagaatcctgaggcagcacaggacattacatggtgaggtggggctagatgtgctagctcagatccttctttctcttcttataaagccaccaatcctatttccatgataaattttaaacgagtttgaaggggacaagtattcaaatcatagcattctgtccctgccccacccccaagcctatgccctgctcacatgccactcagaattattccagtgagggctctctgcagtggcttcctcctgaaacaagtctctgcctgggccactaggagttcaacaacatcctttgaaatctggatggagctgccaaatcttcacagctctttctttctgcaagcttgcagaattagcaccacatggatgttaccaaggtttacaatttataccttctgaagctgaagcataaggcatacatgggacttatttagccacagctggggtagctgtgaagcactgcactgtggtacaggattagaatcccaaggtggccctgggcagtgatctcatggagaatgtgatgtccagtctctggaaattattttgctctcctaggcctcttgacctgtgatgaaaggggcaacctcaaagttttctgaaatgtctttgaggtctttctcccattgtcttgaggtagagcacctagctcccttctattcatgctaatctctttggcaaatggttgctgggcttggtttcttctcctgaacatacttctctatactttaagtgtcagactgagagttttccaaagaattctactctttttccttttggattataaattcggtccttaaattattcttttgctcccaaatctcagcacaagtggtgaaaagtaaccaggaagcttctgtattttccttagaaatttcttccgccagataccctagtttatcattctcaagtttggctttccacaaaaccttcaggcatggaaacaactcagccaagttctttgacagtttataacaaggatggcctttaccccagattacaatacgttgttcctcagttccatcaaagacctcatcagaatggcctctactgtacatatttctatcagaattctggtcatgaccacttaaccaagcttaaggtgttccagactttcactaatcttcttgtcttctatgttctcaccagaatctgtttttttttttttttctagcctgatcctttaaattcttctagcctctctccattgcccagttccaaagctgcttccacattttcagatattcattcttggcaacatccacttctgatactaatcttctgtcttagtttgttcatcgttgcttataacagaatacttgaaactgaatagtttataagaagtgaaatttatttattgtagttctgaaggctgggaagtccaaggttgagggggtgcatctgataagagccttcttgctggtggagacctgctgtagagtcccaaagtagcatagagtatcacatggtgagggggcttagtgtgctatctcaggtctctcttacactttttataaagccaccagtcccacttctaggataaatttcaaaatgagttttggaggacacatattaaagtcatagcacttgcctatgaggtcatgaaaggtctgaaatcatcctgcctctccagcctcatcttgtgtcccttccctcttgattttcaagctctattaactacactgtctctgttcacagagatttatatatcaagtatcgtttttctggagtgcttttcattttataattcagctcattaactccttctgatatatcacatggttcattgatactttgttttgacacatttcaatttgaaatgttatgctcacttgttgtaactactttttaacacgtgttcatttaaagaaagaataacacaagagtcccactatagaaacttctatttagtattgtactggagattctaggagaaatttttctataaggattaaaaactccaaactcatgttgaaatttatcataggagtgggactggtggctttataaaaagaggaatagagatctgagctagcacactcagccccttcaccaatgtgatgccctagggctaccatgggactctgtagagggttctcaccagaaagaaggctcttaccagattcagcctcttcaccttggactttccagcttccagaactaaaacaacaacaacaacaacaacaacaacgaaacctatggaaaacccaagagaattatcagacgaactactgcaattaattagaaagtttagcaaggttgtgagaaataaaatcaatacataaaagcaaattgcactttatgtgcagttagataattcaattttaaaagaccatttttatgataaccaaaaaatataagctttaataagtaaatacttattagtaagaatacttaaattaagaattttgttcatcgaaagataccagtaacatagagaagtaaagcaatttttaaagacagaacattggaaaaaagccttagcaacctactctcaagtctcaagtacacatctaacaaacagtctgtttacttacaaaaatgtctgagtctgtatttccttctctgaaaaataggatttgaaatagacaatcttgcagtcctccagctgaagttcttggttgttataagatattcactcgttgcaaacttgtctgttttgatttttgaaaggcagactaagattcttctttagaaggacacattatattctgattattctctatgaatataatgaatttgaagacctccaggcaatttatcatattagcatatatggacctgtcttgtttacttatatcttactcaatattttcacattggaccataagtcattcactgtaacttgctactttctgattctgatttttcctgcagcttaagaggaaatttaaatatatatatttattcttaccttggatttatagtgatgctaaatggaggtagtttgagaggggtgaatttaagaatgtggctaaagagtatagtgggaggtttatttctgacactagaggtattatgggaggggctacctatgattataaaagaaataaaatatacaaagcccaagagatagttatcacattgaagaatttctgctttaccagcaaactactttctataactgtctccaagtcataaagctttgtttatgtgtaatatctgaaaaacaaactctatatcatgaagcggtttaacatgctgtttggtctttgtgaagcaaatttggagtttagctacaaaattattggaggatactgtaatttatagtaacaaaagcattttatcctgtgatttcaggaaaccaagaaattattttgcataccacactgccaccctgaatacaaaatttaaaagttagctgtatgtttatgaaatataatacatatgacaaagcatatccttccttattcatctctgaaatctattaaagtacatagaataaatgtagaaaagtaacagcaagttggaaatataatttaggtttgcagacaataagtaaatatttgaataattttgataaaacaggccacgattttataggtgcttctgtcaagttactaaatcaaaatattatggaattctttcagttattaaaattgcattcgaattttttagatgaaaaaaagcaaggtgacaggctatacatcagttaaattgtgagcattcttttctaattttccccataaaccagaaatattaagtgtcatgctaacatctgtggcctgaacataaagttgacaaaaatcaaacctaatggcttttcccactgtaaaataatgtctagtttcaatctgcagtttttttttaagtctcaagtgtcaaagtaatgtctcatgtttgtaaccactttgtgttttcacatcaaatatagtttcactagaatctaagttctttttaaaaagaattggtttatgatgacattttgttctcatatggtctcaaatattctttttgtcaaataatcagaatgatgagggtactagtaatcatctaatataacattttagtttttgacatgtagagagagagagccctttttattccataggatctaattcagtagaaaatgaaaacaaattctccaaaagtgggttcaaagatgtaggtggctgttgtatatattcagggaagcttcctgatagtagtgggatacaacgtgtgcggtttatcacatacatgtacatgtatataacaagattcttactagactttttggttagacttccctacattgaaggggattgtattcacaaggtcacagtttctcttctctgcatatagtcaaagctgcactctgagacatctctgatttctgatcccaagaatagcttgtcctttgctttttactttccaatagggaatggatgtcctttgactcagctaatcgcagtggccctatttcttccaactgtcctgtttgtggttacatcatctcaaattgctgtgagattcaactctccagtctctgtcacatatatataatacagctcagctgagtggcagcaagctttgtttcggaactggcaacattccaggagtctggttgtgtgcctcgggtaaatttttgtcttgctatttgttgttggtgtggtttctaggtgaccctaatgaaaatgtccaggaaattacatgcgatattcctgacagttccaagtctaacagctgcttattaggatagacatctgactttatctggtgcctaatgattttgttgtggtttagtattccaccgactggattgcttaggtgctattcgtaacagacacacaacttagtctctgccttctgggagctgatgatccctaattcacagagcttaagagggcacaaggccatccacagcatgtctagaaagccagagaacttttccttagcactctcagcttttgaattaatttctcttttttcttcttggtggcccacactctaatctcactttttattcatatccaaaagaataatttacctcaaacaacataaagaactacctctactgaagtcatgtgaattttaacactgaattaatctaaaaaataggaatgttataatatttgagtttaaaatgttagtgacagaggaataattttgcacaatagagtcttctcttcattacttactattggcccatgtgaccatgaatctaaatatgatccttaatacacagattcacattatgttaatgtgtgtatgtccttctcagtaacccctgacagaacaagtcatttcatcaagagtcggggaggttatcagctgatcggtctgtgaattagtaatcatgctcagctgaatgattagactgttataaaaagaagttatcacagtacctgactttgggtcaaggcatgcatttgattattggtatattttgggtgtacatggcatatagaattcaggaaagaatatatgggattttaaatttattttaatatgtaaaataccgtattgtattagttatctactgctatatacaaattacccctaaacttagtgaattaaaataacaaacatttattaaatcacaatttctgtgagtcagggattggagagaagttagctgaggttctggtgtagagtttctcaggcgtctgcagtccagttgttggctgaggctatagttatctgaaggcttgacaggggctatcagacccagttctaagatgtttcactcacatggttctttacagcagtcctcagttcattgtcacatgggcctctttatagggtggttgagtgtcctgaaagcatggcagctgacttttttcaaagcaaggggtctaagagaaagagcaagaaccctcaatgacttttatgcctcatcatattccatcaattctgccataatctattggtttgaagtttattgttataaatccagcccacatttcagaagaggggaattcaactcaacttcttgaagtgaggagtatgatataaaggagtttgcagatatattttaaaaccaccacatgcattgaaaggatagagaaataatgctcaggaaactatccaacataattgagccactaaggatccagatttgttttgaaagttttctcctctgtttctcctattacctggaaaatatcttaccttggcttctgaagctattgatatatatctaattgctataggtatattcctaataaagtctaaactaattactagggaaacggaacccacaaaattatgtttatttttccttaattctggagtattaatgttaaatatgaccctcctgtcccaggatgtcagcagaggcttcaaagctgggaacactatattttaagtgctctcttgttctgaagaccagagacatttccaaaggacttgctaaagagtggaaataaaaatgatcttataaactttagccaatgtgacatgagataataaatttggagaaataggaggaagatgctttgaaaaggattgttggcttactcaagaggagactgttttattctaactcagctaagtggtggaggatgtcttcttatgatgaagggaaactgccatattgcccctggtggttgttggctgagctgtggaaatgagcttgggtgatgctgatctgtttaccctggcttgaatccctatgtgcacaaggaaagctacctcgagtaactgctaaagaacaagtaaggagagaaagctgcagtgagagcaaataactccattagtaggagggcaagggtacacttactggagcaagagaaggcactgtggaaggaagtgaaatagaaccctttagagaggatgtctagtgaggcaaggtgacccagcaaatgaaggttctgtggggtgtcattagaaatggggactgtgaataagccacttgaaggcatccagaaaaaatgttgctcactggtaaatgatgtaatgttgaacgcttctgtgggaaagcgtctccagagaacccaccaaaacatcccttgtgtgagagagccaatgtttggacatcttccgtgacagaggatttccaacaaccaggagaaaatacaaatgatgccattaattttaaacagatttttccaatttaacattcatccctgttcccaacccacgtctagggggagctagaggcagtgtagtgagtcaggaatgaagttggaagagaaaggtggaaacatagtaaaatatcatgatacgcccttgcttccaattactgtgaaactgagaatcagttctgagtgaggctgggaagtggaagcttaaaattgagtgaaaactgaatgcttcgttgtatattaaactggaaagaagatggaaaaggagactattctaatgcctgaaagtaatcagaaagctgtggaatctaagatatggccaagaggtaagggaaggaaaatacgacaaaacaggtttgaggacagatatgaacaaaattaaaaaaaaatcctacttaaactctttggcccattcaataaatttgttgcaaaagagcttgttgggtacaatgttttcgagttaacgtcctgtggcatattggatctcttcacagatgttcatcaagtgatggtaagtgggagaagtttatctctattctcacccatcctataaatgctgtggagtgaagtgatgaactgagagactcatgtaaaatagtactgaggataagctggcactgagcaagagggaagaggactagtaactatattgtcaagtactggcaatgagagactgcatgtacactggagtgtaccaaacattgccttcctggtcagagaaatgagcagatctgagtagacaattttttttcttttttttcttttttttcttttcttttttttttttttgagatggagtcttgctctgtcacccaggctggaatccagtggcatgatctgggcttaccgcaacctccgcctcctgggttcaagcaattctcctgcctcagcctccctagtagctgggattacaggcgcctgccaccacacctggctaatttttgtatttttagtagagacagggtttcactattttggctgggctggtctccagctcctgacctcgtgattcgcccatctcggcctcccaaagtgctgggattacaggcctgagccaacatgcctggcctgagtagacattttaacaggcggtgacaagtgaacaggcaacactgaatgcttttctagacaccataagaaataattgcactgtggctattttttatttatttgggaattatttggaatcttttaatctcttcagttggactactgcaaactgatgatatttgaaagtgcacctgcaaccacttttttttttttgagatggagtcttgctttgttgcccaggctggagtgcagtggcgcgatcttgactcactgtaacctccacctcctgggttcaaggaattctcctatctcagccttccaggtaggtgggattataggtatgtgccaccatgcccggctaatttttgtatttttagtagagacagggtttccccatgttggccaggctggtctcaaactcctggtctcaggtgatctacccgcctcggcctcccaaagtgctgggattgcaggcatgagccactgcgcctggtgcgaaccacttttgtacataactaaaggactgaagtcaaaggatgtccacagggaaaatattgagtgaaaataataataataatatatacaacagttcagtattgttctaaatgttttacatacattaactcatttgtttggatacacttgccttgccctatcattggcaatgattttcacaaatttttaatatacctgacattaagcatttttatatttgtaatctgccatagacatcctatttaaatttagctagttaagattgccttattggtgagcaccaggtgcggcgtggggcagggcagggtcgtcatggcggagttgcagcagctgcgggtgcaggagacggtggactccatggtgaagagtctagagagagaacatccagaagatgcagagtcttatgttcccgtgcagcaccagctgttgtgaggacagctaggcatccatgcagtaagtgcaccagtgcatcgagcgctgccatgcacctctggctcaagtccaggccttggtcaccagtaagttggagaagttccatgaccgccaggcctggtgcaccaaacattgcaacgacaaagccaaagattcaatagatgctgggagtaaggagcttcaggggaagcggtagctggactgtcgtgtgaccaagtgtgtggatgaccacatgcacctcatcccaaccatgaccaagaagaaggaggctctcttacccattgggaaatagaagtccttgccagtggccatcgggactgagggcaagaatatattttttaataaggaattgggaatttcagtattttaagcaaagtttatgaatgaagaaattaaggatggcaacaagtgtaaggcatatgtcacttgcctccggacactggttctttcatgtttcagtcctaaaaagtgaaataggaaaaagtggtgctaaattgcatcggagatattacaggaagttttagagcttatgttcctgtggctagtgcttgtcctggccgtaaggatgttgcctgtaataagtcagagccctccaaggtaccagactcttcttactacacaggtaccaataggctggaaggttagacctgatggagtttgaggagagatattttctctttgttgccaacatcctgtttaccagaagggtcatcacaccattttctgtaagctgtgaaacaaaatccaagaggtcaatcacttagaagggaaaaacaaatttctgggtcttagttttcttgattttgtgtaatttatacaatggtatacaaattgattttaagatgtggaattgggagggagagtagtttggataagaactttgaagatccttttggatccccatttctggtcatcgatatgtaaatatacatttcttaatattattacatgctgtgtctttcaacctggagaccgtgcaaaaacataagaggtgacgacacactaattgtgggaagcagagcttccctcttactggctgatgggccctgaggttgtgtgtagcaaaatgacaggacgaatcttgcagtaacactttccccttgaagagaagggggttttgactgtgatatatattagtatctaggaatgaatagtaaaagaggagcaattggctacttgcttataagggagttatgaagtactggatttggaaaaacctggtttttataaaacagaatggaatgaaagcctaaacctagcgttgtttccttagctccctgaattaacagagcccaattgagataaacccctggcaacaggaaattcaagggaaaaaaagtaaacaactcgggctaggatgagctgactcccttagagcaaaggagaggcagccagtccccattatcaaataccatttttgcccggggcttttgaaacttgcagtgtttcaaaactggcaaggcaccttattattttgataccaacctcattgtattttcaccaacttattacttgaaatgataatacagcctgtccatttgctgttttcaggctgtgatatattttcttagtaatttggttttaaaaataaataaggtttaattcccccctccccgccacaaaaaagattgccttattcattactaaagaatgatatatcactttttagaagtatgtgatgttttctaactacaatttttacaaactaggcttttagaattgccatttatgatcattcttgcaatgcaaactaaaactaaaatacgttgctgtttaggtttataaaacaagtgccattcatcagggaaaagatagaatacgtcttttctttttctttcttcttagaagagttttgtataaagaacttcttttaaatatttgagatacttttcacccagaagaggtgttgtttaaattggggtttgtgactaatttgtttcaattaaaaatactttaatatcattatcaaatgcctcttagatgatatgatctctgttaccatatgtggtagtttgctctacatactagctatttaaaacagatgtaagtaaaacaagatttgtttgggaggaatagggtttctccagagtaaagaatacagagaccaaatggaaacatacttgcttcactgcacatggtttctatacttggctgtgctggcttaccattttatggttaccagatttacatcctttgaaattatggacattggatcaaatcctcatgttggaaaacactctaaggtaacattaaatgagcatgtgatttgaataacctacaattttcacacaggttttgatgaccaaagtcaaaatatttcccataaaatactgtaaatttgctaaaatttatacaaagctcctacagtgtaataatacaaagaaactttgtttactgaaaaaatctaaaatatctttttttatattttattttaaacaattttttaagtttgtatttttatcttatttatttaagcttgttttctctctcttttttaaaataattctaaaaaaactagatacaaatgcagagcgtgcaggcttgttacataggtatacgtgtgccatggtggtttgctgcacctattgacccatcctctaagttccctcctctcctcctgtcacctcccaccccctaaagggccttggtgtgtgttgttcccctccctatgtccatgttttctcattgttcaactcccacttatgagtaagaacatggggtatttggttttctgttcctctgttagtttgctgaggatgatggcttccagcttcatccatctccctgcaaaggacatgatctcattcctttttatgactgcatagtattccatggtgtatatgtaccacattttctttatcctgtctatcattgatgggcatttgggttggttccatgtctttgctattgtaaatagtgctgcaataaacatacgtttgcatgtgtctttatagtagaatgatatatatcttcctttgagtatatacccagtaatgggattgctgggtcaaatggtatttctggttctagaccttgaggagtctccatactgtcttccccaatggttgaactcatttacattcccaccaacagagtaaaagcattcctatttctccacagtctcgccagcatctattgtttcctcacttaataatcaccattctgacaggcgtgagatggtgtctcattgtggttttgatttgcatttctctgatgatcagtgatgttgagctttttttcatatgtttgttggagacataaatgtcttcttttgagaagtgtctgttgatatcctttacccactttttgctggggttgttttttttcttgtaaatttgtttaagttccttgtaaattctggatattagacttttgtgagatgggtagattgcaaaaatttctcccattctgtaggttgcctgtttgttctgatgatagtttcttttgctgtgcagaagctctttagtttaattagattccatttgtcaattttggcttttgttgcaattgcttttggtgtttttgtcatgaagtctttgcccatgcctatgtcctgaatggtatggcctaggttttcttctagagtttttatggtttggggtttgacatttaagcctttaatccatcttgagttgatttttgtgtaaggtgtaaggaaggggtccagtttcagttttctgcatatggctagccagttttctcagcaccatttactaaacaggagatcctttcccctgtttaataaattttatataagtttattaaaattatagaattgtagagctagaagattcttagaaggtctatagtcactatgttagcagattcttagattagtcatatttgactcagcaagtacagtgttgtatttgtattaggttctttttgtgttagtttcttctttgtatttgtattcttgaatttgtattagttttcttttctttcttttttttggagacagggtcttgctcagttgctcaggctgcagtgcagtggcatgatcacagctctctgtagctttgacctcctgggctcaagcaatcctcccagctcagtctcctaattagctggtactataggtgcacaccatcatgcttgggtgatttttttttaatattttttgtagagacagcgtttcacatgttgcccaggctggtctcaaaacttgggctcaagtggtccgcctttctgggtctcctagagtgctgggattacaggtatgagccaccacgcccagcttgtattagttttctcttactgtgccacaaattaccacagactgtacagcttaaaacaacatgtatttattatcttacagttgtgtaggccagaagtctaggtacaatgtcactgtattctcttctcagggtttctttagactgaaatcaaagtgttgtccagggctgggcttcttatttgggatttgggattctcttccaagttcattgtttgtaggcagaattcatttccttgaaagcttattgactgagctccccattgtctgctagctgtcaaatctctgacttcctctcctgaaaccagccagagaaaactcttggtttttaaagggatcatgtgatcaggttaggcccacctcgataatacagtttttgccctgtaatatagttttggagtgatatctcatcatatttacaagttctgctcacattcaaggagaggagattttacaagggcgtgggtcatggggaacgagttaccttttgcctgacacacacacatacacacacacacacacacatatatatgtatgtgtgtatatatatatatatatatatatatatatatatatatatatatagcaatgactgtaactttatggtctgcgggattatttgtatctaggaaatctgccttctgaacagtggtcagaaggtctggcttgtctggttattgccatctattcctacttcattttactcacatacccctggccctaatgtgctttttgggaagtaggcaatactctctcgtgggtatctttggcttagtggtgccaatattccaggcttaaacttctcctctctcctttgttctcacactggagactacttcaatgtttatggcaaatgtacacactctggtttcatagtatttaaaataaagtgaccatatttcctacttataagacaatttttggctcagaaatgtatacagaaatacactttttaaataattttcaggcacagtttcaaatactcactaaattgctcctttcccatttttcctataatgcacaataatgtatgtcccttgatctagtcccagaaaaggtttccaggaagatttctgagaaaagcgcatatgtgacattttctgaaatgaacttgctcagcaacatgtacttttttcctttttgttaatgtccccatatttgagcagaaggtaaaattttgtttacatgtataacttgcttcaatttttcacacacgttttctaagaatgtgcatactgaagttggtgggttataaaagggattaataccccttttggcctatatttattggaaagaccaagttgccagggttctttgaagaattcagacaaatacatctgaatattttccatcaaacgggaggtagaggatcaagcatggatttgctctttatagcacttctggcaagaggcttttggaataaaatttatgtattccttctcaatttggttaaccgcaacatctgtttgtctccattggcctttggccattgacctactgtctcctgtagaagacacccaccatcactcttacgaccaaatgttgatgggaaacaagcagttctcaagtgattttagtcatggaaatagtgataagccaaaagcatggcctaattatatcatctaaattcatggaaaagggaattaattttatattttatctgattttggggactgaattattaatagtaccaacttatttggacaggaaaaggccaagagatttagacaagaacacagtaaacagacccttctcattcaatatagcatgggacatgtagatttactttttgactgcaggaacaattagaggaatctaggtgatttttccaaacttaggaaatgaaagtttaactaaaattaaatatgtctgtatgtttatacatttttgagataaaacactattttctctagttttttaaaaatgattttttctaatttctaacaatagcttataagtttactacacaattattgctacttcgaaaacggatttaccactgttaggcagaacaaacaaaggttcaggagaggccaatgcctgtgagaccgtggtaccaggatcttccagtaacaacttggagcctgccaggctatcctttgatcaagggctctctcagtgttggtacctcttgctgcctggtcctgctttgtcctggccagccataccctgcccagctgtgaaagaccattcagtttctgctttttctttaatttttagattttttttgtttacctcaaattattccagttgcatgatagcaaaagtaagccaggtccctttaagaagcactggactgaaaatccagcttctgctataaaaactcatttccccactcaaggcattttccttctgatttcagaggtgaggtactcagatgtgcttttgcctccaatctcagcatcttctcctattcatttgttgcccattctatgctttcaatttctgctatagccactcagtcttcctctgttctggtctcaaggtgagcattttctgctacccctgtgtctagtgacacctcccagtttctggcacataactcttttctctggttctctcttaagaccttggtttgtctctggcccaattcaggccacgatttctacccaccttgacctttgccatggttggagctgtatcttatgacactgtgttagctgtatcttatcacacaaacctgtgggaacaagagatgtagtatctacccacaaggaatctacagactactgggaatagcagaccctcattaattaattattagcattaattcttcatgcttgtaatcctaaattttttaaaaatttgagaacaatttttttttctgtctagtttgggtgttggctattcctaaatattatggtacttacttgtttacctgaaggctggtttctcacctggctgcacctctgctggggggtgctcactttgtccctaacttttgggtcaataggaagaagtaagacattgagtgaataaatttgaccttaagctgctctttgccatggaggagtcctggcccctagtgtttgactgtcagtgtttctttaccccataaaaattttcatccctaataaaatgctgccatgtaactgactctacatgctgaaccaagagaaattaagaagaataaacctaatttgcttcagaaaagaatgtttcaatatagaggaattatttcttattttaaccttgataattttgcctataacattttctggaaaatagataagtatgcagagtcttagttatatttatagtaaaataaaatatagcaaggttaatggaattgtccagagacccacaacgaacagagggcagatcacagaactccacactcatactcatgttctagccattaggcctcttggcctctctttgttctatttgccaaggtatgaccagagcagaaaacatcctcaaccaattaggcaagctccccatctggtgattagtcttgctatgaagacatcttgtgtattaccacatttacgactgcaattggagctttatttaccattgggggtatagctctttccgaggaaatgaccttctaactgagccaggaggggctgggctaagtttgtttcagctggaaattacacattacatatttagtatgtttggtcactttagatctctgtgaggcagggaaggagaattttatgcattacaaagttcctaaaaatatttacaatcttgtaaatcaaagtgggtttctactggatttagctttatgcaaatctttatattatgtctgggctttcagtctgattttagaagagtactattacagtattttaacttttattgaaaatccaggctttttaatttttttaatttttaatttttgtgggtacgtaataggtgtatacatttatggggtacatgaaatattctggtataggcatgcaaagcataatagtcataacatgtagaattgggtatccatcccctgaagcacttgtcctttctgttacaaacaattaaattgtatcttgagttattttaaaatgtacaattaaattattttgacgacaatcaccctgttgtactatgaaatactaggtcatatttattatttctatcttttttgtacctattaacgtctcaatctccttctcactacccttcccagtctctggtaaccattctttcattctttctctctatgagtttaactgatttgatttttagatgctaccagtaagtgagaacgtgagatgtttgcttttctctgcctgacttatttgacttaatgtaatgaattccagttccatccatgttattgcgaatgacaggattggatttaattttcttttatggctgaatagtactccattgtatataagtgtcacattttctttattcattcatctgttgatggacacttaggttgcttccaaatcttgactattgtgaacagcgctgggacaaacatgggagtacagatatatctcttcaatatgctagtttcctttcttttgggtaaaaactcagcagaaggattcctggatcgtaaggtacctctgtttttaattgttttgagaaaactccaaactgtttttcataatggctgtactaatttaccttcccaccaacagtgtataagggttcccttttctccatatcctcgccagcatttgatatagcctgacttttctttttttgagatagggtatcactctgtcacccaggctggagtgcagtggtgtgatctcagctcacttcagccttgaccctgtgggctgaagtgacctcccacctcagccacccgagtaggtgggactacaggcatgtgccaccatgcctggcttgcctgacttttagataaaagtcattttaactggagtgagatgatatctcattgtagttttgatttgcatatctctgatgatcagtaatgttgagcactttttcttatgcctgtttgccattcatatgtctatttttgagaaatgtctatttaaatcttttgccaatttttaaatcagattattagatttttaagttttatgaagtctagaaattttagagttgtttgagcttcttatgtattctaattattaatcccttgtcagatgagtagttagcaaatattttctcacagcctctgtgttatctgtttactttgttgattgtttgccgtgcagaagctttttaatttgatgtgatcccatttgtctgttttcgctttgtttgcctatgcttgtggggtattactcaaggatttttttttgcccagaccaatatcttggagagtttccccaatgttttcttgtagtagtttcatagtagtttgaggtgttagacttcagtgtttaatccattttgctttgatttttgtatatggtgagagaaagggatccagtttcattcttctgcaagtagatatccatgtggatattcagtttcccccataccgtttattgaagagactgtcttttctccagtgtatattcttggcacctgtgtcaaaaacgagttcacagtaggtgtgtggacttgtttctgggttctttattctgttccattggtctatgtgtctgtttttatgtgagtaccatgctgttttggttactgtagtcctttagtataatttgaagtcaggtaatgtcattcctccagttttgttctttttgctcagggtagctttggctactcagggtcttttgtggtttcatataaattttagaattgctttttccatttctgtgaagaatgtcatttgtatttttataaaaattgcatcaaatctgtggattgctttgggtagtatggacattttaacaatattgattcttccagtccatgaacatagaatatctttccaattttttgtgtcttgttcaatttctctcattatcattttatagttgtctttatggagatctttcactttaatggttaattcttagttatttcattttatttgtggctattgtaaagggagtactttcattatttctttttcagattgttcacagtttttatatagaaatgctactgattttcatatgttgattttgtatcttgcaacttgactgaatttatcagtttgaatagtttttttggtgttgtctttagttttctccaaatgtaagatcatattatctgcaaagaaacataatttgcattcttcatttccaatgtggatgccccttatttttttttcttgtctgattgctctagctaagactttccttactatgctgaacaacagtagtgaaaatgggcattcttgtaatgttccagatctaaaaggaaaggctttgattttgtccctgttcaatgtaatactagctgtgggcctgtcatatacggcttttttaatgttgagttatgtttcttctaaaccaagttttttgaggttttctattatgaagagatgttaaagtttatcaaatgctttttcgacatcaatcgaaatgatcatatgttttttgtcctttattctattaatatgtagtatcaccttgattaatttgcatatgttgaaccactcttgcagccctgggataaatcccacctggtcatgatgaatgatctttttaatgtattgttgaatgtggtttgctaatattttgttgaggagaaaacctagactatttcaatgtgtttatgcttagctatcatgcccaaatcaatttagtacatcgtttaaagattccagatactctaaatctggcaaccaggaaagaaaacagccataaagcaatgtatatttagataccaatatttccctcacactttcttttcgcttccttgtttcatttctttactaatttgttgattattggcttatgacatattgaggcctcagtctataataaccatttttatctgatgtacagctctacacattttatttaactctgtgatggcaaactcctggtacttttgtcattctcttgcctcttaggcttatggcagatatcactaaacagtgacaatattctttgctactaacctgtgggtttggcatacacagtagtgtatgcattatcaacctatagaagtggcttataagtttaagtctgctagctttttctactcttttagcattcttaaacgctgtttaattagatgtaaaagaaggaaatgagaagttaaatttggactaaatgtgataaaagaaaatctttattaacataggatatcagtgagtctgatgaaaaggctttaaaatgctctaggaagtatttctgcctgggatgtttgaattaaacagtctccaaaagtagatcattctccttttgtttgaatattttcagaaatgataaatacactttttgctgttgttgttgttttgagacacccagggtggagtgcaatggcatgatcttgactcactgcaacctccacctcccaggttcaagcgattctcctgcctcagcctcctgattagctgggattacaggcacccaccaccacacccgggtaatttttgtatttttagtacagatgggatttcaccatgttggtctcgaactcctgacctcaggtgatccacctgcctctatctctgaaagtgctgggtttacaggcatgagccactgtgtctggcctagaaataataaatatactgtttaatgaaatagcttattctatgtttgaagtttcttaagtttagaaaattttatgtcgaactgaaatttctttttctataacttataccaatttttcttgtattctttcaatggaaaacaatgttttttatgttttatgtttttaaaattaagatgtcatttatttaaaatagaataaaatatagaggtcctaagatttcagtttgatgactgttgaaaattgtgtacacctatgtgactactacccaacataagatataggacattagtttcattccagaaagatcgctattcctgtttcaagttaatttcctgctcttcgtcccataaaggcaatcagtttcttacttctgtcaccattgattagttttagtgataaaaatggacttatacagtacgtattatgtcatatgtataaatagatgtattatgacagtaaggttgttatgaacatttctgtaaaaactttaatgaacatatgttttcattgcttttgggtaagtatataggaataaaattgctagggcagaagttatgtttaacttctttagaaacagccaaacagttttccagattgatagtacccttttgcattctcactagcaatgaatgagttccagttgcaacatgtcttgctagtcatttaagtatagccattctagtagttttgaatctgtatttcattctggtttcaatttgtgttttcctgatgactatacattttagcagattgatggagttattaaccctttaaaataaatgtaaacttcccaacccatttttatctaagctagtactaatttaaatctccccttacgtgtgctattgtttgaaataaaatgtatgacattaaatttactttaataacattagatattatgtatgattttcacctattaagataattttaattttgtcattgtattagttacaaatatgtattatagatctgtggctaatttaaccaaaaatacctgaaatacctggctttatgtctgtaccactacttcatattgagggacaaagctatgagtagaatcctgcacttcctcattagaagaagcatttttaattaatattgactcttgagatgattgttcaacctgcttttaaaacttctgaattttttcatcaacccatattactatatctcattgattaaatgctcatgagggatttgaccaatgacttagcagtgtcaaaatctgctaaactatgagaatatgctgttctaatatcctaaaaatgctgtaaaggtggagattatttcagataatagctcctaattattgcaaaaccatgatataacaaagagatcactagacttgtaatcgtaaatatttcattttctagctggattaccaggaaaagtcactatatttatctgaattctatatttcacatctgttaaatggagatagtagtatctattttgtctacctcatagggttgttgtgattatcacactagatattgtgattatcacactagatattgtgtgtaaagtgttttgtaactgtaaaaaaatacatatgtaagatattaaaagcttgtatgttgatgtcgccagtttatagcatagtgtttgcacatagtaggtgctctaacaaaagtagcttttgttaaatgatggctggatgaacaatatctcaaagcaattttgttaataaacaattatagaaattgttaaatattatatcaatattaatacaaaaattcctgctccactttagtaaaagtcacatttgttcatttatagtcttttggaatccctcatattctttgtgactacttgtgataaatgtcaacaagtttgacatcactcaagcaggtacttgaaggggccctagcagcaagtcatttatggcagaattccatttttataaatatcatgggcttgccttcctactccttattattgaactcacctttaatttgaagactatttttaaaataagaaatatttaagcaaaaatttctatttttcttgatcttgagtacctgctcattgctatttgttacctttcccaatatcattaggtggtagtttaatttctttgtttgttactgttctgagcatttttaaagtgcttgactgatttattttaatcctgctattatatgttttccccaagtctcaggccttatcttatttcctctcgcagtagcatttgacacagtggaccatgcccttttccttgaaactcttcatcatcactgtgtgggctccccattgcctgattcttctcccacttcactgtctgttccctctaagtgtccttaactgcttctttttcatctccctccatgagactatcagaaaatttattaccagaaatcttgcagaacaggagtgagtgggatgatatattaaaagcagtaaaagaaaaaaaatctatcacatgatgataaaatggtcagttcaacagcaagttataacaattacaaatatacacatacccaacatcagagcacctaaatatataaagcaaatactaaaagttacaaagggagactgacaaaaatacaataatagtaggatacttcagtgctgtacttttaataatagatagaacatccagatacaaaatcaatatagaaacagctaacttgaacaatactatgtaccaagtggacctaacagacatatacagatctttccatccaccagtagaagaatatatatgtttttcaagtgcacgtggaatgttctctaggatagatcacattacatcacaaaacaggtctgatcaatttaaaaagattaaaatcacaccagttatacttttcagccacaatagaataaaactaaaaacaataacagtaaaaaaaatgagaaaattcacaaatacatggaaactaaacaacacactcttgaacaaacattgggcaaaagagaaaatatagtgggaatgtaaaaagtatctcaagataaatgagaatacaacctacgaaaacttatggatgcacaaaggcagtactaagaaaaaagtttataatggcaaacacctaattttaaaaagtagaaaatttaaaatttaaatttaaaaatattttaaattaaaaaatttatcagaaaaaataataagatgacagtagaaatatgtaaaattcagaatagaaaaaatttgaaaaactaagagttttttttgaaaagataaacattgataaacccctagctatgctaatataaaagaagattcaaatagaattaaaaaagaagaaattatgagatgacttataaataaaagaattataagatgctgttatgaaaaattatactcaaataaattaaataaccttgaagaaatggataaatctttaaaaacatacaacctaccaaaactgaatcgagaataaatgggaaacctaaacagatcaataataaataaggcgattgaatcagtagtcagaaaccttccaagaaataaaagcccaggatcagatagcttcactggtgaattccaccaaatattcaaagaataattaatgctcattcatttcaaactcttccaaaaaagtggaaggggggaatacttccaaacatatttttatgaggctggcgttattctgatacaaaagccagaaaaagagaacacaagcaaagaaaacataggccagtattcctggacataaaagcaaaaattctccacaaaatactagcaaactgaatccaataacacattagaaagataatgcacttcacatatgttgaatgattcttgtatccagggataaatttcacatgaatcaagtgagatttagccctgggattcaagaatggttcaacatatgcaaattaattgatgtaatacatcatgttaatatagcaaaaaaagcacataatttcaattaatgcagagaaagcatttgacaaaattcatcatttgttaatgacacagactcttaacaaaatatgtataaaagaaacctacatgaaactaataaaggccatataagaaaagcagagagctatatagcatcataatcaatggagtgaaactgaaagctttttttttaagattagaaacaaagcaaagatgtccactcttaccacttcattcaacatagtactggaagttatagccagaataattggacaagagaaagaaataaaagtcactgaataaaaaagaaagtaaaacattatatgcttgcggatgacgtgagtgtatatgtagaaaaccataaagactcaagaagaaactatgagaactaaataaatgaagtcactaaagttgtgggatacaaaaccaacatagaaaaatcagtagtgattttatacataaaccatgagctacccaaaaaggaaataaataaaataattccatttataatagtaacaaaaagaataaaataagatacaaattaaactaaagaagttagaaaagtgtacaatgataattgtaaaacactgatgagggaaattaatgaatgcacagataaatgaaaagacatccagtgttcatggattggcaaaactaatactgtcaaaatgtccatcctatacaaagtgatcttcagatttaatgcaatcccttatcaaaatcccagtggcattctttacagaaacaggaaaacaaattctaaatttttatagaaccatgatagacctctaatagccaactcagtcctgagaaagaaaaagctgaaggcatcatacttcctgatttcaaaatgtgtaaccaaaactacactaatagtgtatatgtgccacattttcttaatccagtctatcgttgttggacatttaggttggttccaagtctttgctattgtgaatagtgctcctataaacatatgtgtgcatgtgtccttatagcagcatgatttataatcctttgggtatatacccagtaatgggatggctgggtcaaatggtatttctagttctagatccctgaaggaatcgccacactgacttccacaatggttgaactagtttacggtcccaccaacagtgtaaaagtgttcctatttctccacatcctctccagcacctgttgtttcctgactttttaaatgtgacacatatacaccatggaatactatgcagccataaaaaatggtgagttcatgtcctttgtagggacatggatgaaactggaaaccatcattctcagcaaactatcgcaaggacaaaaaaccaaacaccacatgttcttgctcataggtgggaattgaacaatgagaacacatggacacaggaaggggaacatcacacaccagggactgttgtggggtggggggagtggggagggatagcattaggagatatacctaatgctaaatgatgagttaatgggtgcagcacaccaacatggcacatatatacatatgtaacaaacctgtacgttgtgcacatgtaccctaaaatttaaagtataataataataaaataaaaaaactacactaatagaaataggatggtactggcataaaaacagacatatagatgaatgaaatagaaatagaagtaaatgcacacatctgtagccacctgatctttgataatgctgctgagaacacacaatgaagggaaaggatagtcttcaataaatggtattaggaaaactagatatccacatgcagggaaataaaattgtactactatctcatagtatctacaaaaaccaactcaaaatgaataaaagacttaaacatacgacaaaaaacttaaaaactgctagaaaaatacacagggaaaaaggttcttgacattgatgttggacagttatattttggatgacaccagaatcacagacagaaggaatgaaatagacaaattggattgtgtcaaactgaacttctgcacaaagcaaataatctacagagtaaaagacaacctatggaatgaagaaagcatttgcaaaccatatactttataaggggttaatattcaaaatacataagaaactcagtgacaaaaaagcaacactttttaaaaatgagcagagggtgtgaacatttcttaaaagaagacatacaaatgttcaacaagtgttggaaaaggtgcccaacatcaccaatcatcaggaaaatgcaagtcaaagccacactgaaatatcacttcaaacttgttagaatgattattatcaaaatgatgaaaaatagcaagtgttggcaaggatgtgaagaggggacccttgtgcactgttggtatgaatgtaaattagttcaactattatgaaaaacactatggaagttgctcaaaaatttaaaaatagaactaccttatgatccagctaccttagctctaagtatagtttcaaaaaatataaaattattatctggaatagcttgttccatcctcatgttcattaaagcattattcacattggccaagatatggaaagaacctaaatgtccttcaatcaatgaatggactacatataatatgtactactatatatacacacatatgtatgtgtatatatgtttatgtactatatatacacatacatatgtgtgtatatatacacactatatatgtagttagaatatatatacatgctatatgtatgtaactatatatatacacacttcatatacatgtagttagaatatatatgcacacacatttaaactacatatataaatgtagtatataggtatatatgtgtattacacatatatgtacgtatatatatataaatgcagtgtatatgtatatatgtagtgtatatgtgtatatatagtagtatctataaaatgttgtccattcatctattgatggacatttaggttgtttctatatcttgcctactgtgactaatgctttaatgaacatgagagtggaactagctattccagataataattttgtatgttttggatctatacctagagctaagattgctctaacaatgtgtgtgtgtgtgtgtgtgtgtgtgtgtgtgtgtattctaactgcatacgcacacaatccatgcaataggttaagattccaccgtaaaaaaggaaacttcgtcatttgtgacaaggtggatgaatctgaaggactttatgttaagtgaaataagccagacatagaaagacaaatactgtatcatatcacttagatttggaatctaaaatagtcaaactcatagaaacagagagtagaatggtggttgctagagattaggagggggaaaaaattagaaatgtgggccaaagggtatagactttcagatatgcagtatgaataagttcaggagagctaatgtgaatattgaaatttcctaggatggtatcatgttttcaccacagacatagaagagaaaatggtaactctgtgagaagatggacatgttaactagcttgtgtaaaccaaaaataaaattctaagcctcttaaccaactgatggaccctccctcttggccaaagggaccccaaagaaatctgttcaggccatgatgggaagggggcatctgacatgccttggtatatcctcttccctttggaatttaggcacaactgaccagctttaacattaaatagagatcttaaaactgacaaaacactttttgtagcaataaaataccaaattccaaccttatgctggtgaagcatcacatgacagataggccctgcagaggatcaaagtattttacccctaaatgtatttctttgacatattttgaaatggccctgcaaagctatctcttgtcagggaaatttgcattctgtagacaatctccttctcttaaaaagtcttttctggagagactgacatctgttaaggtccaataagagacatttaccgtctattctttctgaagcctgttggtggcttcatctacaaaaaaaaaaaaacattgacttcctttccttatttaactgaattatttctttatgctgagtttaaccctttaggcaaagcttaattctttcaaccaattgtcaatcaggaaatttctgactccacctatgacctgaaagtatttagtttgagatgtctgcccttccggggctaattaatgttacataccttacatgtattgatttatgcctttgcctgtaacttctgtctccctaaaaggtataaaaccaagctttaacccaaccaccttgggcgcatgttctcaggacctcctgaggtggtcacaaaccatagttctcatatttggctcagaataaacctctgcaaatattttacagactttgggttttttggtcaatgcttgattgtgattattatttcacagaatatatgtatgtgaaaacatcaagttgtataccttaaatatatataatttttaaaatttgccaattatgcctcaataaatgtgaggaacaaaagaggttacagtatgatgaatttaataaactccttttataatatatttaaatagcaacttttggtgtgtaaaatgttgctatttttactgaatatgcatgagaatttttcgattaaaatatttatatatgtaatttgaacacaaaaatagaattttaactttctttagttttgatataaatgctttaaaatagaaactgcaactttaaattttaattctgattttttccagaatttgacttgaagtattttaaagaggaaaatcttttagcgtagttcgaagttgggtagcatgatgtctccagctttgttctttttgcttaagattgtcttagctatatgggctcttttttggttccatgtgaattttaacatagttttttctaattctgtgaagaatgccaattgtagtttaatgggactagtgttgaacctataaattactttggacattatggtcattttcacgatattaattcttcctatccattagcatggaatgtttttccatttttgtgtgtgtgtgtgtcctctctgatttccttgagcagtgatttgtagttctccttgaagagatagatccttcacatcccttgttagctgtgtacctaggtatttcaatctctttgtagccaattgtgaatgggagttcagtcatgatttggctctttgcatgcctgttgttggtgaacaggaaagctagcaatttttgcacattgattttgtatgctgagactttgctgaagttgcttatcaccttaagcttttgggctgagacagtggggttttctagatataggaacctgtcatctgcaaagataatttcacttcctctcttcctatttgaataccctttatttctttctcttgcttgattgccctggccagaacttccaataatatattgaataaaactggtgagagagggcatccttgtcttgtactggttttcaaggagaatgcttccagcttttgcccattcagtatgatattggctgtcgtctatggatcttattaattttgaagtatattccttcaatacctagtttattgagaatttttaacatgaagggatactgaattttatcagaggccttttctccattttttgagataatcatgtggtttctgtcttagttctgtttgtgtgattaattataattattgatctgcttatgttgaaccaaccttgcatccagggatgaagccaacttgattgtggtgaataagctttttgatgtgctgctggattcggattgccactattttattgaggatttttgcatcagtgttcattagggatattggcctgaagttttgttgttgttgtatctcatccaggttttggtatcaggatgatgctggtctcataaaatgagttagggagtagtccctccttttcaatttttttggaatagttccactagaaatggtaccagctcctcacaccagttagaatggcaattattaaaaagtcaagaaataacagatcccggcaatgctgcggagaaaaaggaatgcttttacactgttgttgggaatgaaattagttcaaccattttggaagacagtgtggtgtttcttcaaagatcaagaagcagaagtatcatttgatccagcaaccccattactaggtatatacccaaaggaatataaatcattctgttataaagatacatgccacatatgttcatcacagcaccattcacaatagcaaagacatggaatcaacccacatgctcattaatgatagactggataaagaaaatgtggtacatataccccatggaatatatgcaactataaaaagtaagaagatcaagtcctttgcaggaacacagatgaagctggaggccattatccttagtgaactaacacaggaacagaaaactaaacaccgcatgttctcacttataagtgggagctgaatgatgagaacacatggacacaggtaggggaacaacacacaccggggcttgttgggggcagtgtggggagggagagccttaggaagaatatctaatggatgctgagcttaatacctaggtgataggttgatctgtgcagcaaaccaccatggcacacgtctacctatgtaacaaacctgtgcatcctgcacccgtccttcgaaacttgaaataaaatttgatgaaaaaaaagtaatctcacttccataagaggatgaaaatgtatgagtagggcattatttaggtgaactgttcataagatacctcataacatcacattatggctaacattaatttttgttgtttggacagtctagcctggacagactttgtctttgttttttgttaaaaacgaatcttgcaagaaaaacagaagaaaatcttaaaaattttatagcagctttattttaaaattgatcgtgtatgaataaattaccattttaaatgtgaattcccttttttaatgggagttttaatataaatgttcaaaaatagttaatcattattagaagtcattttaatattctattatttcaatgtttctagtatttactaaaataaactgcttctttaacataatttatttttctatagaattactatatcaggcttgctatttgtgctcataaacttgtcatgaaataactcacaaaaaagtttataatctaaagatagtgacatatgaaaatgattttacacttttatatatttaaaaatcacaactatgcacaatttctattgaatggtcattaatgtatatacatgtgtagagggatattaagaattctgagtgtacatggagaaaaattctctttcagccatttttcctgaatctaatttttggcaaaataaccattaaactatttttttctgccaaaaatgtgatttgattttttttttaaagtaaaaggaatggggtgtggttgggtgtggatatagatatttggacaacacaaatctttaataaagatgagcaaagaccttgaaatgatgccatccttttttcttgctctttatttctccctaaccaacagagacattccaaaattcctcttacagtaaacttactttaaacttatctacacagtaattaaccttttgttgttagctatcagaacaatgggtattccttcacaatgaaattttgaaaataattaccaggtcttgatatggtcttttaaagagaaattgaagtttcttttggagaattgctaaggaattatctaaattgtgtaattttttttgctttccttggtggttggacattaattcaaactttggcattttatgtgtttgccaaaggaaccttatttaatggatttgtctatgaatagacgctggaataggcttggctttctggagatgcttgggactttcagaaaatgggtaaccagaaaaatggcttgctgcccttcaagaataaatagtgtcccactgtaaggtcaatttggcttcatcctcactcccttatatacatgactaaataaggggaaagcctgggaaaccatttcccagtttcccttaccaagagcgtttcaggttaaattctcctagtgggaagcagtaggactcaatttggaaattgaaagagaagaagctgttctctggcagctcctataaaggaggctacagtgggcacgtcttaatttcctgaattctatcagcagtttccctgacttttgctccctcagcccttctcatggtatgacccactaattccctatattaaacccctttcaacttgatacctataagttttattttttcttaataaaattctgaatggcaaccccaaaactattaaatccaggaattatttcaacaaatgcaatgagaatatggttaaaaagtttttagcagactgtgtgataagaagattgaatacacacagattctttttctgtcaccattgtctttgttgtgtttccctagaagcacacctggagattaaaatttgataaaaagataattccaggaagcactaatagggcaagcagaaagtaatatagggaagagaaggaagctaataccgggggaaaaaaaagcatgttattgtggtgggctattacctgttgtagttggttcatttatttgttactagcataattctaactgatatcatgggtcattgtgaacaaaggcgtgtttttttggaattaaggagcctagtctgcctgcaatagggaggggatttacagattttggagagcgctgaattccaaggagttggtgttgacttgccatttgtcagaacatttcagagacaagcaaagtgaagcccattagattgattacactcacctaatgaaagagaatttagaatttgaaacattgcagatatttattaccactgaccaaatgtaatatcaagacagctggcaagttcaagtggatgagcatagcaatagaaatggcttggtcttttggtaaagacctaaaagaggaatggctgtagaaagatacagatgtttgatgatagctgcaaagtatactcaatgattgacaaagaaagtatttgttataattttctcagatccaagtggatctgtataaagatctaaatagtacagttttctatatcaggatagtttgatgccattattgattagtagctgctatctttttttcctgtttttgttttcttaatcttcttttgtataaaatcttaattaatgtctacatttttggcatgttggctggctggcatatttagctaatccagcatattccttggtggccttattggggaaaagtgttagtttttcaaagtttttttttcctatttactgtttccaaaaaggttttaagtaaattccatacttctttttctaactagtggcagttgattctaataaatgtaagcaaaccatattgtaaaagatagcaatttgatatcacatacatacaaattaaatgcaaaatacaacagcccaagaatccccaaaaagatatgcgactgcacagaaacaagaagcacagccctgtgctagttatgaaccacttttggattccttgtgttgacatggagcagagccgtggggacatggattttggaggagctgaccactttggaatagtagcaaggaagaagtatatacctatttctagataaaattcagaaggcttttttctgacttttgatgacagtttgattattgcagtctacaatgaagattcatgaaattgagttctcaaagatttcaagaataaaacaacctataccgtttgaatatttgatcagttttaaatatttgggatttgaaaggcaaaactatgtaaatttccatatgctatcactaaaggctggtattttatttaataaactttgtcaagagactaacttttcaaaactcattcttcttttttacgagaagaagtgaaaggagtagaaatacagcctgttgatgcccacaaacttatcctaagagtttacacatatcttgttaagcttctcaacaatgctataaattgtgggttttgtcccagctttacaaaagagggtcatgaggcgaagataatttctttagaaacttgattaagatcatgaaaataaatgtgatagaattaggattcaaatccaggtttatattactgattgattcatccaaaatgtttatttactatgtgccaaatcttaagctaaatattgtattagtttgctagtgtatccatagaaaaatgccacagactgtatagcttaaaaaacagaaatatattttcccacaattctggagaatagaagtctgagatcaagatgccagctgggttagtttcttctgaggctttcagaagatggttaagccaaactgttaatttttaaacatcatgaactaacttgtcctcaaagaacttcatcaacttgaacattttcaaagagctctataaggcagctcagcatggcagtttttttactgaaatatcttatctggaagatggcaaaacagacctggaccttcacaagccaatggttgcttgtattcatatcacagttcacttgggtaagtggtaacaacagaataaaaagcagattgcctccatactggttgggtgagatagcttcatttttggaaaatcaattgaatcatgaaaatcttcccaatggtataatttgttccggagttcttttgatagttaagaagggaaatagtaatcattgtccacagtctttatttatttcttttttttacaaatactcttatggcattctcgagccatcattctatggtgtggtgactgattgtactccatgcaggtcacctccttgccatgtcttcccatggtgttccctctgtgtgtgcacatctgtgtgctagtctccttttcttttaaggacatcatttatattggattagagcccaccctaatgatgtgactttaacttaattacctttttaaagactatctccaaatgtagtcactttctgaggtatgtcaacctattaattctgggtacaaagttcggcccataaatgatgttatggacccaatgtctaacaaaggccaaacactctccctgacttcggagaatttagtttagtaagggagattagcattaagcaaaaaattacctatatatatatatgtacattgctctagtaataagaactctgaaggggaattaaaggatgttacaagagtttgaacacatccatggggatagcaaagactttcttgaggaaataatgacccagttaactctgacaatgaaaagggcagtgaagtctggtccaggcagataatctacttgtgcagggaaagctcctatgcggagggagcttagggaatttaaggttagaagtgagagaagccttgtcagcttttggttagaaatttggtctttattccaagagtaattagaagcaattgaaagtttcatagttgatttgtgttttgaaaagagtactctttctgcttataaaatactcagctgattaaccacattttttattgacttttcaattggtggtggttctatcatgcacacgcagaaaaatttaaaagttagcttaactttttaggactctcattacttcctattttctagcttgaagtttgcaagaagtgaaaaaaaagaattataaaattttacttcaacctttgaaaggaagattccattatttagacaattggaaaagaagacaaaagactaaaaacattgttgttaatcaggatctgccttagagttaaatctttctttggtatttcctgtctgtctccacaaagttgtcagatatttggacctattcttcatacgatgaacattactaactgcctttagtcccagtaggaactatgtgcttgcactgaagaaaaaaaattgtctgaaaggctaaatacaaatatagtaaggtatatatgtatagaagttggtgatttatcggggcacctgccctgatattcacgtaggttcttttctattttccttaagtgtcagccagcttgagaaataaagggacagagtacaaaagaaagaaattttaaagctgggcatctgggggagacatcacatgtcggtaggttctgtgatgccacacaagccgcaaaaaccagcaagtttttattagggagtttcaagaggggagggagtgtgcgaacaggtgtgggtcacagacatcaagtcctttacaaggtaatagaatatcacaaggcaaatggaggcagggcgagatcacaggaccacaggacccaggggaaatgaaaattgctaatgaagttttgggcaccattgttattgatagcatcttatcaggagacaggttttgagatcaactggtctgaccaaaatttattaggcgggaatttcctcttcctaataagcctgggagcgctatgggagactggagtctatttcacctctgcactctcgaccataagagatgaccacgcccaggggagccagttcagagacctacccccaggtggcattctctttctcagggatgttccatgctgagaaaaaaaattcagcgatatttctcccatttgcttttgaaagaagagaaatatggctctgttccacccggctcaccggcggtcagagtttaaggttatctctcttattccctgaacaattgctgttatcctgttcttttttcaaggtgcccagatttcatattgctcaaacacacatgccgtacaatttgtgcagttaatgcaattattacagggtcctgaggtgatatacatcctcctcagctgacaggattaagagattaaagtaaagacaggcataggaaatcacaagggtattgattggggaagtgataagtgtccatgaaatctccataatttatgtttagagattgcggtaaagacaggcataagaaattataaaagtattaatttggggtactaataaatatccatgaaatcttcacaatccacattcttctgccatggcttcagtgggtccctccatttggggtccctgactcccgcaacagtgattaaaatattaagtgcttccaaatggtacaatttgagattctgtgtataaaattgagtatgaatgattaaaatagtgaagtagtttccatcgacttctgaaaacaaagaagctttctgtttgttcagtttcttttttaattttaaaaatttatgactatttttattacataatattcaatcttataattgacattgaatgtatttttttcaaaataaaatttttcttcaccttcaaaaaagacttctattttactaaaatgatgtagaaaccagttagccttaagtttaaatggagaccaatatattaattttcaagttacagaattcctaccaaagaggggatagctatagctatctaacaccctgtgagaaatagaatgataacagtaaatatcagccataacaaagttatcaaattcctcttgtttcataggagtacaaagaaatcatgctttatcatcaaattcctcttgtttcttaggagtacaaagaaatatgttaaagtatgatattaatagaacattaattggtaaaagtcacaatctgtattttgtagatctgtacaatgaaaaaatgaatgacttaatgtagacaggtgaatagttttaggaaatgattagactttcaataaaacacaacgttgcatagctagcataaagctagttaaaatatgagaaatcaaaagctgctttcctgaggctagccaaatgacgagaagtgaggtaagtccagagtctgacccaaattaaaatctgtttccagactcaatctgaatgcttcctttttcctttattgctcagagtagattttataagtattgcctggaagaagaagctatattatatattaaaatatatgctattctttctttaaaaattcaaataaacatatttagttcacatcattactcatgtttgtgttcaagggtagataaaagaggagtagggaaagtagtactcacttgagctgataaatatctctaagaaaattttaaaatacatgtttaaatttatgtgtaagttttattaatttttatttgacatttaaatgtaaaatattttatcactcaaatatatttcagctataaaataaataacagttaaggatttaaaaatatttatactctgaactgtagaaatattagtcccttgaaagatctctttatttccaaaatatttctattgcaagtgtcagaaatggtaactatataacaattgagaacgtaggaaattatttattcatatatgaattcccactcataaattttggctgccttcactgaaggctttcaccaaagtgctatcaattttcacttctccttcattcccatgatgtcttgcagaaacaaaaggaggaagaaaaaataatctaaagattgaatggctgtcccacagattcacagccaaaattaaaacaagaacatttttggcctacttaatatacttactttccccaaaaagaatctcataaaaattggtaccaattattgttacacataaaaatgcagacctaatttcctttacatttgctggcacatacctagtcttgtaagaaagtgaaaatagtatgcttatactgtgtatacatgtggagctccctccacacaggagctttccctgcacatatagctctttgtacagtctaaagtgcaccaccactttactaataatatttttgttgtaatgttaattttaaattttaatatttaactttcaataagatcaaaataatatcctagagttctgtggaagaagagaaaaaattaatcagcacagctatttttatatatttaaagcaagttaccagtgacatacacagtcatctgtctaatgtgtgttctcaggggatgtttttatttgctccattttatttgtcctacataaaacaaatactgttaagtaaaagaatataagaaacacatgaataaatttagacctttcttttaagagtgattaaaatgtttctcttagaagagtagtatttacttctttaggtaactaatgactaatatttttgctttctccaggtaactagtgaaagtgtttaaatatctagagttagaaccaaaagacaggaaattatttaagttgtaaaataatactataattgatatattataccaaaatcaattacaatctcccataggatcagaaaccatgaaaaattatgtatttcaacaatgggaacatttttaaactgaagaaaataattttaataaaaccttattaataattttaataaaaatacacctagctcaaaacctttccctagtaacactttagtatgtgtactgaactgttcatcttaagataatggtaagaaatttttatatgctgtgtttcagtcacaaaaagaggaaatgcataaattcatacaattcatttttctactaaacttaaacttttagttccaaaatggaaaaatagctaatttactgaaaatctgttataaatactatttgataattatttaaaactaaaacttctaactctatatttaccttcactaggatattctatgctttctacgtcattgcttatgagtctcatgttttgataagacaaaattgtgtaagttaaaagattatctttgtatcatggaaagataatggtatctaaatttggaaagatatattttaactgaaaaatgtgctcaaccagaattaacaaaatatatgaaatccaggtctaccatttactaactctgtaataaagtttttaatttctttgagtttcaaatttctcacctataaaatggcaatgataaaaagcaataccataaggctactgtgaaaattataagagacttagaaagtgcaatgcataatgtttgatttattgtagttattatttaaatttttaacagtatgtatatatatgtaatattggattttattttattaattcgattaagacatattatgtagaaaaataaacttcctatgccatatataacacaaatgtattaagaaacaattgtgctaaattaagtgaagttaaaaagcgtatgattcttcataacaaaactatatacaatcatttcaagaacagtcaaaacatatgctaggcaatagagtgctgaaaaatgtttggtatcatctctttgagaagtgaggtaatttttcgcttcttaaaacataaagatggatttaggagtaatatatattcttttctatatgggtagatatagaccagtaaaagtgaatctatgcattgaggtaattacatgtacattgaaaaaaaatgaagctaatttaagaaagtcttctctcatctagatattttagctcaaatgcctcaggaataaattatctcatataagcaaatcacttattctcttgtctttactaatatagtttttgcttattgtttttatgactcttgaattactattgagataatagataatgcacatgccttaatctatatttcaaagaaaaatttaaaatattttaaattccatgttcttcttgtagtttcttaatcaagtattttgcctatttctcaaacaaaatggtaattaaaaaaaacacctgtaatttccagtttctatttttcacttttccccttgcttatttagagctgactctgaccaaatctgtgaagcagtgggtttgtgttttcttcctggtttccttatgtatagatgacagtatctatccctgggcagtgccagggcatgtccttagagcggttttttgagtagtaatgatggatttacattgattcatctatactcttggcctagtttctttcgtggccatcatcctgccttcctggaatccagaccgaaattagtggttctggttttgcctcagaactgagtaaaattagctatgctagctggagactagctaaactggctccaagtaaaccaaaagtagaattgcccttctcccttctccaaccttctccttcctaacctttccaacaaatcatagatgtgtctaagctcttagagttctagggaagttacctgtatttaatcttgtcctttctctacagataagactctaggagactaagacttaaggaaaaaatctctaagtgatgtgtgttttaaaaagaaagcccaggaattataaactgtacacaaataaaggacattgtatttttaacgttctctacttcagttgtacactgtcctactaaaagtgatgatatcttcaatattctgctagagccacttctcacttcatgttgccttgtatattttgcctttaaaatattcataaacctttcaattgtttaacttttacattttcggacaacctagtcatcagagaactcatatttctgagttccttgcttaaacaatatttagccagctgaaggtttcaattaagagactttatattagcctcagatcaacagttcctaagaaacaatagaagctttatcaaataatccacttatcatctctgacaaaagaacatatatattgtctttcctaaaaatataggattgttgtaatatgtcaatctctctattttcctaatatgttcattagttcactcttcatatcccaggggataaaatgtcttgattacctgattaggaaatatatttgctcattattccctgaaaacattttgcactgtgtatatttaatgctgtttatacaaaagaaaggcctattttttttttaatctactccaacaatatgtttgttcttaaatcttctggcataacattctgtattttccctgccccagacatgaagttaaccacttctcgaaggctccttttgttgaaggaaggtagttagaagtaaagatctgaggagtagatttgctagttggtgttgctgtccaccattttggtggacaaagctaaatttatttttatgtctatctatgtgtttgttgaaatgcatgagttcatactgatatacccaattccaagatgacatcccagggttcgtcctagttttctctctttccaaatttttaactcctttcaactacagtaataatcctgactacaattattcttaatatatatacttatttgatcaatcccctccatgtaaccagtcttccattgccactgctgcccccttccctgcatagataccctctccatcttgctctgggctctaaccccacagaccttgctatctttctctatatgagcgctttcctcattacacttgtgccccaatagctcacactgggcagccctccaatacagacagctatctcattctgctcaggttttgagaccactttgagagcactgatgcttccctgccttgcttggcatcacctaacggttttgggtctgaattgcccggaaaagaaagggaacaggaagagaaagagtaaactttgtatgttaaagattcaagttaatgaaaaagatcctaccatttgacattccatggcaccctttgggatgagttgcatgtcctctcttactaatattgtacagtttaggcatgttttcttcttttctcttaaaacatttttctctcttggttgctaaggccacatcctgttgtgattatttttatttattattgtttttttttctaatcctcttcattgatttcctttcatttggttttaaaacatagttttaaattttattttagattcaaggggtacatgtgcaggtttgttacatgagtaaattgcatgattgctgagatgaatgatcccatccacacagggagtgagcatagtacccaacaggtagtgatatggtttgcctgtgtccccacctgtatctcatgttgaattgtagctcccataattctcacatgttgtgggaggaacccgatgggagataattgaatcatggaggtggttt

SEQ ID NO: 2063 - RNA, 125370 nt, Homo sapiens
  source 1..125370: mol_type = genomic RNA
caaacctgcacatcctgcacatgtaccccggaactgaaaattaaaaaaaattccttactactatttaaaaaaactttattaaagtacaatcagtgtgcaaaaaagtatacctatcataagagggcatgttgataaaatttcacaaattggacacaaccacaaaaccaggaacaaaatcaagaagcaaaactttactagtgtctcagaagctcttcttatgcaccccccgagcccctgccccatcactacctcctccatacctccaacaacatctattagttttgtctgtttttgaactttacataatggaatcacataatgtgtaatattttgcatttgacttatttattgccctcaacattaggtttaagaggtgtgcttaattttttaaaatttattgtgtgctgccacaataaattaaatgtcattgaaacattatttgtaggcacagtttaaggtatcagaataaggttcaccatagagaatttgcatttgattctatcaggtctctaggggcactggggcattggtagattgatcagagggtttctcaatcatctagctgaaacatgatcataatctgttaaggtccactgcctatgaccccacgccctcaacccctggccctgcttgaattatcactgaggctacccttctggcagtctcctggatgtagagtaggggtgtgtttacttctattttacctttgcaatgagaaaatagccctttgaagttctggtttaagttgggaagactctccttttgaatgcctcaccctggcatggctgggctttgattacagttcccccttgaccctcaaggacatcagactaatattaacttttactctgtgtggtaaatatcctcagggcaaaagcaactttgacgtccattatgcacctttggtgagaaaagtccccttacactttgacttgctatttccttactaacttggcatttctttagtagcatcaagaaaataagatgatagttttccttatttttaaagcaaaggttttgttgagataaccttgtgaacaatattacagaaaactttcatagctacttgctatggagatcttaggtcctttcatcccacacttgttttggctataaaattgcctttagtacattcttaaactgaagcttctgatgataattcttaagtttgtgctcctaagggcctactgggacctatttctttgactttttctcccgaagacactatctttccccagtatctgaatgtttttggctttgagtaaaatgtttgcttattttatgtagtagatattagtgtctttactgttttatctccctttcagaaaggaacatctgagtttgcaatagtttaaactgaatcttgttttactgtcttttcttcctttgtacttgtaggcctacatagaattgattacttcacttcttttgctttctcttgctacttgatctaggtattgttaattatccacggatgaggataaataacaaatacacacacacacacacaccccttaggcatatcatattcaaacttcagaaaaccaaagacaaagaaaaatctctaaagaaatcaaataataaaaacagacatatagaggaacaagaataagaattatactggactgtttgtcagaaaccatgaaagcaagaagagagtggagtacattatttaaagtgttgaaataaaaactttcaccaggctagaattttataaccagcaaaattatccttcaaatgtgaaggagagagggagactttttcagagaaacaaaactgaggaaactcattgtcagtagacctgatttataagaccatgttaaaagaagttattcattaagaagaaaaatgatatagggcacagatctacacaaagaagagtgtcagaggagaaataaatgaagataagataacattgtttagttttttcaagctaaactttcttaactatataaaacataactgtttcaagcaataccaacaatgcactgggtggttatagtataggggtaagggaaatgaaagacaacagtgtgaaatgaacaagcaggagcaaatgggaatattctgttttaagatatatatactacatgtgaaggcagacttaggttacttaaaatataaatatgtattatatataatatatgtaaatatatataatatgtattatatatataatatatgtaaatatatataatatgtattatatatataatatatgtaaatatatataatatatattatctttatcacatctggtacagcagctgcaattggagtcatcactttgttaaacttatgataaggcactgtcattctccaagatccatctgtcttctgcacagccaaatgggagagttgaatgggaataaccactcgtgcttctttcaagtccttgatagtggcactaatctccacagtccctccagggatgcgatattgtttttgatttactatttttctaggtagaggcagctctaatggcttccatttggcctttctcaccgtaacagccctcaccctaccagtcagggagccaatgtgggggttctgccagttgctaagaatgtctatgcctattatgcactggggaaatgaccacaggatgagtccgggaacccactggatccactctttgttggacctgagctacaactccattaattacctgacctccataagcccctgctttaactggaggaccacagtgacattttgggtcctctggaatcaatgtcagctcagagccagtgtccactagttccttaaatgtcgatcatttccctctccccagtgggcaggtaccctggtaaaaggctggaggtctccttggggaaggatgggagaaagattcactgctcaaattgtcgataacgtagtgaggtccttcctcaagggtacctggcctccccttcattcaaggagttctgggtctgtaaactggctcaagtctggaaatcgattgaggggccattattctctgtttttataatttaaattagtcttttgtccattcgacctagaagttttctgctagtataaattaagtacgaatgcagtaggcttcctatcaatttcacttctaggaacaccgtgattaattagccaatgccataactctacacgagtcagaccattctgattgccactttgcctctgctgtccaataaggtagctacgcccaccttgcctttgaaggttgagtgccaccacttggctcctgccacctcaggatctaattactcccattgtatttaaattttgtggttgagtgactgcagttcccactgttagatctgacatacagagaagagcaattacagggctcttcaaagatgcaggtgccaccctcgcaaatctattttgcaaggcattggtcaagggtgtatcttctggaccctcccagctgggatgagaggtctaaagtgactaatccactccatcatcccaatctccctaagcctctggatcccttcctctccattaaaccaagggagatcaggcatttccagcttgcttacagtgggccatcttttagtccatatttcagctaaccaagcaaataaactattagaacattttttaactcaccaagctgcaacattagaagcagagttcctatgtagtgggcccaaattaataaattcggcctgatccaactctgtattccttccaccattatcccacacccttaatatccattcccatgttcttcagatttctgtttatataaatgagaaaactcaagcagttcttttccagtgtagcgcacctcctcatgggtcacactctcaaccttacttctaggggcccgccgggactttagtctagttataggtctagaagcaaacaggcaggttgggggtggctcctgaggagaatcagcattaccttgcctggcaaccacctcaggggaggccatcactgttgcctcaggcggcacagggtttatctcttcagacaaaggtagaaaggctgatggcagcatgggtcggggaggggatgttgccactactggggatggggaagctgttccttctggcaaaaaagattcatcagagtttacaaattcagtatccccagcttcatcagtgtcttcccacatgttcctgttccaagttgcagggtcccattcttttccaatcaatctcactttaatagacacctggtgaggctgtgcatgcaccttctgttgcaggtcacccactttcatgataagagtttgtgcctgtttttccataattcccgctctttctctataggaaataagactttcacttagggcaatcttaacagacttgaggttcagtatttgcttctgaagccaggagacagaatccatgagtttatcattttctttcatcactttgtccactgaacttaggcgcaaccaatcagcttcattacgttccttggttctgcacatatggtcaaaggtattatgtatagagtcactaaactccttgcctctcatgagtggtgaattgggagtgtcaaatgcatttattttgtataactctctaaacaatccatgccaaggactatcagtgttctccatactattagaagtagaatccttagcatttttgagtctaatcatattaagcagccaactccagaaactcccaaactaatgaaagaactccattcttaaaatactgttcctctagaaccattcttggtaccaaaatctatatttgccagagttctctagagggacagaactactaggatacaaagtcccacaataagctgtctttaagcttgagaagcaaggagagtgagtctgagtctcaaaactgaagaacttggagtccaatgtttgagggcaggaagcatccagcatgggagaaagatataggctgggagactaggccagtctctccttttcacgtttttctgcctgccttatatttgctggcagttcattagattgtgcccaccagattaagggtgaatcctctttcccgagcccactgactcaaatgttaatctcctttggcaacaccctcacagacatgcccaggatcaatactttgcatccttcagttcaatcaagttgacactcagtattaaccatcacagagggccactgttctccagactccagaatgatagatccactggcagcttgtaccctgcacctggaaaagctacaggcattcaatgccagcccttgagagcagcattggggggtcgagccctggaaggccacaggggcggagctgcccaaggccttgggagcccagcccttacatcagtgtgccctggatgtgggacatggagtcaaaagagattattgtggagctatacaatttaatgaccaccctgctgggttttggacttgcatagggcctgtagccctgttcttttggctgatttctctcttttggaatggaagtatttacccaatgactatacccccattgtatcttggaggtaactaacttgttttttattttacaggctcataggcagaagggactagccttgtctcagatgagactttggactgtggagttttgagttaatgctggaatgaattaagactttgggaaactgttgggaaggcatgattgtattttgcagtgtgagaaggacatgagatttgggagggcccaggggcagaatgatgtggtttgaatctgtgtcctcactcaaatctcatgttcaattgtaatccccaatgttggaagtgggacctggtgggaggtgattggatcatgggggcactttcacatgaatggcttagcaccatcccctcagtgctgtcctcatgataatgagtgagtgagttattgtgagatatggttatttagaaatgtgtagcacctctcccctctctctcttcttcctgctccacccatgtaagatctaactgcctcctcttttccttccaccatgattgtaagtttcctgagacttccctagaagcagaagcagctatgcttcctgtacagcctgcagaacaatgagcgaattaaacctcttttctttataaattacccagtcttgggtattcctttatagcaatacgagaatggcctaatacaaaaaggtatacagtttgggagagaggaaataaaattatctttgcagatgacatgactgtctttacaaaatatcctacagactggcagaaacaaacaaacaaacaagaaacacctctccttgaaggaaataataatcaatataacaaggtttcagtatacagagttaacatacaaaatcagttgctttcctatacactggcaatagacaattgaaatttgaaattataataataaaatgtcatttacagaagtgataccctccttcccccaacgaacccaccaattcaacaacaactcacagacaaattctcttactgagaaatccaaaactagttgagagcctcctgcacccagacacatcaaatcccacaggaaaattcaggacaccctcatgtctgaatccctacccacagctcaatgccacatgattgaaaggaatcatagctcccagcttctccctggagagtaaaagagttggaccatgtgtatgacactcttccaacttcttcctccccaaaggatgggcctttctctttccagtcttggagcagtaatggaacccagcataatctagccatccaggggctggtaagaacaaagacagaagtttgcactgacagttaccatatcctttccctcagctcaacacagagcaagaaaatgaaaaatccctgcttccaacatcttcttgggaagggaagagttagtctgcttggccaatgccccagtgtttctgggagcttcccaaaggacttcctctgtctggcttgttttggggtacttatgggacctggcatactctagctgccttggggccaatgagaacaaatatggtggtttgatctagcatgcaactagatgatgcagtcccacccacaagctcagtgtagggtgaacaggtgaaaaaccacagatcccagcttctctctctgtgtgtcatgggaagagttggaaagggcatcaaatgattcaacttttctgggggctacttgaggaatggccccaatatcacttctattggaacactgattgtacctagcatactctagatggtagctgctaagaacaaagaaaacagattggcaggttggagaggccccgagaatccatggctgagctggttagtgagggtcttctcctttataagtttagtctgtgaagattgggagaggtcactgttttgtctaatataccaaccctacacaaagagtcaaggaaaataaaaataacatggaaatggattccaaacaaaggaacaagataaatctccagaaacaaagcctaatgaaagagaaatatttgatttacctaacagagaactcaaaataaccattatgaagatgttcaccaaaaccaagagaacaatgcatgaacatgagtatttcaacagagatatagaaagtataaaaagtaccaaaaagaatttgtagagctaaataatacaataacagctcaaaaattcactaaagcagtgtgacagcagactaaatcaagcagaagaaaagataagcacacttgaagacaagttattgttgttagaaattattcagtcagaagagcaaaaagaaaaacgaatgacaaaaataaagacagcttaaaggacttatgggacaccatcaagtggaccaatgtgcacattataggagttcttggaggagagaggagagagagaaagaaccacaaaacatattcaaagaaataatagcacaaaacttcccaaatctggggaagaaaatgcacattctactctaggaagcccagcagataccagatgaaatgaacggaaagaaacctacactgagatacattataattatattgtcaaaagtcaaggcaaagggagaattttcaaagtagcaacagaaaagtgatttgtcatgtacaagggatttcccataaaactaaaagtggatttttcagtagaaaaccttgcaggccagaagggagtgggatgatatattcaaagtgctgaaattaaaaaaaaaaaacctgccaatgaaaaatacttggcatgccaaaattctccttcaaaaatagagactttcccagacaaataaaagcagagaggctgggcgctgtggctcatgcctgtaatcccagcattttgggaggccacggcgggcggatcacttgaggtcaggagttaaagaccagcctggccaatatagtgaaaccccatctctactaaagatacaaaaaattagctgggcatggtggcaggcgcctataatcccagctacttgggaggctgaggcagagattgcattgagccgagatcatcgtgccattgcattccagccctggcaacagggcgagaatccgtctaaaaaaaaaaaaagtggagagttgatcagcgccatacttgtcttaaaaggaatgctaatggaagctcttcaagttgcaacaaatgacacaaacggtaacatgatagcacaagaaagtgaaacttggtaatgataaatatataggcaaattcagactactgcaaacactgtaactgttggatgaatcacttttaattataaagttaaaagacaaaagatattgaaaatatctgtaattaaatattatttaaagggatatggaatatagagagatgtgaattttaacatctataacatagtgtgtgatgggaaagaagtgcaagtgtagagaaattgaatgtaagttgttatcagtttaatatagactattttaaataaattataagatagactaatagatattttatgtaagccccatagtggccacaaagaaatacctatagaagatacaaaaaaggaaaagagaaagaaatcaaagtatatcagtacaaaatattcactgcaacacaaaggaagacagcatgagagagtaagacataggaggtcaaggtaggaggattacttgagcccaggagcttgagatcagcctagacaacatagcaagaccctatctgtaaaacaatatatttttaaaattagttgagcatggtggcatatacctgtagccctagctgctcaggaggctaatgcaggaggattgcttaagcctagataacaaagagctatgattgtgccagtgcactccagtctgggtgatcctgtctcaataaaaaataaaagacagagaaagaataaaaagacagctgtcagaaccacaagacaaacagacaacaatgaacaaaatggcaatagtaaatttttctctatcaatgcttactttacatagacatggattaaattcctcaaccaaaagacaaagagcagttgaatgaattagaaaaatcagagtaaactatgtgctgtctataagaaactcactttagatttaaagacacagatagtgaagggatggaaatatatattctatgtaaatggtcaccaaaggagaagtggctatacttatatcagacaaaatatatgtaaagtaaaaattagcacaagatacaaggaagaacattatataataatgaaaaggtcaattgaacaggaagatataacacttatatgtacccaacatcagagcatctaaatatataaagcaaaaatcgacacacctaaagaaataatacacaaaaaatacaataattataggaggcttctttaccccatttttaatagtggataaaacaaccagacataaaataacaaacagcagacttgaacagcactatagaccaaatgagcctaacatacatatataaaatattcatctcatagctgcagaatatacattcttctcaggtgtacatgaaacattctctaggatacatcacatgtcaggtcacaaaacaattcttagtaaaattaataggattgaaattataccaaatatctttttggagcacaatggaatgaaactagaaatcagtagcagaaggaaaactggaaaattcacaaatatgtggaaattaacacactcccgatatcctagtattcttcgcttaatgggtcaaagaaaagaataaggaaagaaattagaaaatattgaggcaaattaaaataaaaatacaacataccaaaacttatgggatgcagaaaaaaaaaaaaagaatgtgatatgctggtataggacatttaccatgaatggaattaacaggattgattatagctctgggtgagtcagtgagtgaatgtgaaggcctaggatgttactatacactactatagattctataagcactgtacacttaggctacactaaatttacaaacaaatatttttcttcaataaaaaattaatctgagcttactgtaacatttcgttttataaaattcttaattaaaaaaacttcttaactttttatgataatacttagtttaaaacacaaacacagccgggtgtggtggctcatgcctgtaatcccaacactttggcaagctgaggtgggtggatcacctgaggtcgagagttcgagaccagcccgaccaatatggagaaaccccatctctaataaaagtacaaaattagccatggtggcatatgcctgtaatcccagctactcaggaggctgaggcaggagaatcacttgaacctgggaggcggaggttgcggtgagccgagatcacgctgttatactccagcctgggcaacaaaagcgaaattctgtctcaaaaaaaacaaaacaacaacaacaacaacaacaacaaaaacacgttgtatagctgcataaagatatttgttatatccttattctataagcttttttctttttttttcttttttacgttttaaagttttttgttaaaaacgaagacacaagcacacacaatagcctaggtccttgcaggatcaggatcatcaacatctgtgtcttccacctccacatcttgccccactggagggtcttcaggagcagtaacacacatggagttgccatctcctaggataacaatgccttcttctggaatacctcctgaaggacctgtctgaggctgtcttacagttaacttttttttaatatacataagggtatattataaaataatgataaaaagtcagcacagtaggtttgtttacaccagcatcaccaccacaagcacgtgagtaatgctacgacattattatatcactaggcaacaacaatttttcagcatcattatagtcttatgggaccaccatcatacatgtggtccatctttgacccaaatattattatgctatacatgactgtattggaaataacaaggaaagaaataggagaacctcagttcccaaggtggagatcagttgttgttaaatattagagtgcgtcagaatcacctgaaggacttattgaaacacagattgctggacccttagagttgagtgtctagggtaggacctaacattttgtgtgtctaacaagtctccaggtgatagttatggtattggcctagggaccacattttgggaactatcggcctagattttctccaaaagtaggaggttaggtcaactgctgagaataagggaaagtgggcccttgaactctcctttcagccaaaggcaggcatgttctaaacactgaatcatgttaaaagtgaattttaatctgggggcaattctatgccaagccaactgattagtggtgggattaattcctaggttttagataacagcactgctttgcaaatgctcacagcttaatgataccatagaattattatcagcctcattttcacttgtgtaggaagaggcacggaaataaagaaggcaggagtcttctttcaggtttccttatggtggactctttcataagaaacagttctggcttctcctttgttgttccctcaaagaagattataaatatggttgcttgtctcccacctccatctgcctgagggctgtgctttgcttctgtaaatgtttcagttggaacatgttgattctgtttgagcatctattaacttaggtgtgatgtctaatgttcactgtctcaacgttcacctccactggggagagtggtggcgatttccctgcctctgtctaaggctggaaacattcgttattgtggaggggaaagtggttggttcactgaggtgggggctctgaaacacaggatgtgctttattgctcccacagtcagtcacaagttgacagtcgcatgaggctttcaataaaaatattttatacttttgtgctgcctctcagctgcagatcctaaagccctgttttaaagatcaaaatacccatagatgtgcaaatgccagggattcaacaaaagctggtgcatggatgggaaactgatgacacacacatctgttcagctctcatcaggcttcaccacccactggaatcttttggctacagaaactgaatttgtgattcgtgcttcaagtactgcagtcaacaactcagcaattcacaaagtctcttctgtgattgccgtcttaggtatgtgaggtaatggacaatggatatttaaaattgtgcctcaaccctgctttacctcatcacttattccggtatcagccaaatttatattagaatatgggaagtgcaggttttatataaaaggtgcctaggatagattctggcctatatagctctaataattggtataatactttacaatatagatgatattctcactgtaacacattatagtatacaacgtccattctgtcccctactttatttaaactcaactccataagaaccttgtgagatgggcattattccttaaggtaaaagaagaacaaacaaaaaatggctgcaaccaaaatgtaataattggtgtgaatagttttataataaaaaagaaagacttcactttggatatttgatggctgacacctttcagtttcccacctatcttcctttttctccttagccccacatcctgagaagataagagaacctgggctctcctccactggtgcccatggggaagttcaaaccacacaaatccctgtcctctaggaattctcattctagtcccaaccctcttaactatgataaaaactctaaaccatcaacaccacccccatcttgacttgtgtcaccttaggtagaatctgagcccttcaccttggggaatatgtgagtagtaaactttattttatatctgtaattcctatgttttattcatcctagcattcataaatttctgaggatgctggatgttcatataaataggtttattagctttagatagactaatgatgctttattcaaatgtgtggttatttcagatcaaagaaaaggaagcattgtgcttgacacagggctaagaactgaaaaatgaacaaaatatggcctgtgccctttccttagtagttatggtctggtagaaaaggcagacatgtacattaaaaaattataaaacagtgtcatatgtagcatgtacaagttattgtgggaatgcagaagagagagtggctggtttttccttggtttagcaatatgtgtgtaaagtcataagagcatgaaagaagattgtatgttgaggaaactatttttagttttatttggttggagagctgtattagtgtggagagatgcaatttgaaagggccttaaaggctctgctggtacattggattttatcctgagggcattggtgagttttgaagggctttaagaaatgaaataaaagaagaacacttttgaagagttcactttgatagcagtatggaagatagatgggagccgagacagaaagatacttgagaacaatactactttagtccaagtgagcaatgacaatggctaaatcaggacaaaagcagtgagaatggttagaggaggacatgtgccagacactgttccaggtgttgggatataaggttgaaagaggacagagaaattctgttttttatgatgtttttattctaataagggtatagaagagaaccattaagatccattctcttctctccagcagtaagaaaactccacagatgcagctgaacacatgactacccagaaaatagactacttttcagcctttgttgcagcttcctccaagtctagctatactaggttctggccaaatcatgcccttgaaatgaagaggcatcctcctcctttcccttttccctttctactggttggaatgggtacacagtgatgagatttcttgcaccatgtagccaaggttaccacaggcctgatagaacagcaagacaaaagggctctgaatatgtagcaacttcatggacagctgtcataccaggctgaactttaatgtgaaataactaaaattctgtcttgttgtttctgggtgtctcttcatcacagaagctgagcctacctcataagtaatactgggggagatatacagtcataatggagatttacatgaagagaatgctcaggtcttgaaccccacaaaggcagtcatctaagtgtataaataagttatataagtataagctgaagctgagtctcttaagcttaatatataattattcaaaataagtactagttgtaatttatatgcaaggaaaagctttgtagactgtctgagctagtcagtgagggctcctcagacaagaaagatccacttacgcaaggcacttacacgtgggagtgccagccagtgtgatgaaagagagactagagctgaatatctcatcctatgtctcattatttgaggaacttactaatcctgtattaagaatttggttaattatttgataaaggcatgagtttgttcattgagctgcaagctgattacagtagtaattacaataactaacaagaaaactatagaatgagataaatataataaatgaaataaacaaggtgatgtgatagagtaaatataagctgagcaaaagaatgctgctttagacaagtttgctacggaagtcctccaagagaggtgatgtttgattgatacacaaataataaatggcagttattgtataaaaagtagggggcagggtaggaactttataggcagagggactacaaatacaaaagctctgaggtgagaaagagcctggtatatcttcataggagaaaaaaggccggggtgaatggagaatggaaagcgcgtggggagaaagaaggaagttgaaattgtagagggagggagcaattagatcatcgaactgcttgtaggctatattaaggaattttgttttattctaacagcaaggggaagccattgtacagttttaaacaaaaacatgacattatttgactttaaaaaaataatgttttggttatgtatagaatgaaccatagaagcaaagtggaagcagagattattgcaggaaggtaatttgaaacagggtgatgccagagggaatgggaacaagtgaaaggatttaattgctttttagaaacattgatagggcttactatgagatgcaggtagaggtctgagaaaagaagtcttcaagaatcaatcatgctttttgcttgatttgctaggttgatagtggtaccatttgctaaagctgaaaacactcagggaaatattttttggggtataaaccaaaagatcaattttggacaagtataaaagtgttgatggctataggaaattaggtgtatgaatctgggtttcagacgagagagtgaaatttcagatgagagagagaataaatatagtattaatactttaatagctcattttatttataaaatatttcaaatatactaaaagtacagaaaataatttcataggcataatctcttgatgtacccaccatatagatttaacaaatgttgatattttgcttttttttgcttcagaactttaaaaaatataatgttgcagataaagttaaaggatgagagcattcttaaggatgatgggaagacagaggtttgaatgttatcttacttcttgttcactcccaatgctacctcttctgccagcagacaggtcctagaggataggaatgaagcctcaggttctgtcacagtcttgccaaggagtgcagaggaatttctcttctttgggaagaggagagcttgggcatcagcactgaagagccccaagattaggatcagaatgcctggatcctgggacagcttcgctctcagaaactcataatctcccacaaattcacatctaaagaaatataccaaaattcttatttccggattcctaaaaactgagaagtgaccaaacaggcagctggaccttttctatctcttgggttgggagagcatgacgaggccagagcaagaagatcagaaaggtttccttctgatgccttgacgtggcaccagcaaggtgtcctttaccagaggaaaaaccagaaaggagaaaacctttaagatatacctcatgaaatagagttactgggggaggcagacagtgacccatgacaaaaaacaaagtccttgggagattcaaatacaaaacagaaaaaaactttctggaaccaaaataattttaagaatttgacacaaaaatatgtatacattgtgaaataggtaaatgacaacatgtgcattacctcatatacttatttttttgtgatgaaacacttaaaatctattctcttagcagtttgcaaaaatatagtatgttggtgttaactgttgtcatcatgcacaatagatctcttgaacttattcctcctaggtgaagttttgtattctttgaccgacattgcctcaatccacaatctctccattttctctggcatcagccttttcaaatcaccttcctgcgatagtctctgcttccactttgtccctacaattcattctacccatacccaaaacactatttttcaaagtcaaattacatcatatttttgtccaaagctgtgtaatggcttcttattgctgttaagataaaacaaaattccgttccatagcctattagcaattaggtggtctaactactccctgcctctaccatctcaacttccttctttctcttcccttgcttttcattctccagacacaccgacctcttcagtccctgctaagcataattctactctccacttctgagttcaatttttttacactccatatataagtgagatcatgtggcatttgtctttctatgcctggcttatttcacgtaacataatgtcctccatgtccatccatgttgtcacaaatgacagaaattccttcttttttttttaaagaataaagaatatttcttttcatatatatgccacattttctttctctgttcatccattgatagacacttaggttgattccttatcttggctattgtgaacagtgctgctattaacatggtagtgcagatattcaacatagttatttcatttcctttagatgtatacccagtagtgagatttctgggtcatatggtagctctatttttaagtttttgagaaaactttctactgttttccacaatggctgaactaatttacattttcatctacactgtaaaagggtttctttttctccacatcctcttcaacacttatctttcacttatttgataatagccattctaacaggtgtgaggtaatatctcatagtggttttaatttgcatttctctgatgattagtgatgttgaacgttttttcatatacctattgggcatttgtgtttcttcttttgagaaatgtctattcagatcttttgtccatgtttaaaattagtattgagttgtttgagttccttatatattttggctattaatcccttatcagctgtgtggcttgcacatattttctcccattttgtaggttgtctctttactctgttgattgtttgcttggctgtacagaagcttttcagtttgatataatcccaattgtttatttttgtttttgttgctcatgctttcaggtttatacctaaaaaaagtattacccagaccagtgtaatggagcttttcccctatgttttcttctggtagtttttcattttcagatcttacatttaactcttaaatcaatttttagttgatttttgtttatggtatgagatgagggtctaatttcattcttttgaatgtgaatatctagttttgccaacatcgtttattaacgaatattctcattgtgtattcttagctcctttgtcaaaaatcaattgaccattaatgtgtggatttatttctgggctctctgttcttttggtctatgtatctgtttttatgacagcaccatgctgttttgattattattgctttgtggtatattttgaaatcaggtagtgtggtgccttcagctttgttatttttgcttaagattgctttagctattcagggaattctatggttccaaacaaattttagaattggttattttatttctgtgaaaaaatgccattggaattttgatagaaattacactgaatttgtagatcactttggatagtatggacattttaacaatatgaattcttcaaagccatgaacatagattccctctccatatatccgagtcttcttcaatttcaatgttttacagttttcaatgtgcaggtctttcacctccttggttaaatttatttctaagtaatatttttgtaggtattgtaaatgggattgttttcttgatttcttttgtggataatttgttgttagtatatagaaatgctactgatttatatgttgattttatatactgaaactttaccgaattttgtttaatagttctaataattttttgtggagtctttagggatttttatttataagatcatgtcatttttacataggaacaatttaacatcttcttttccaatttggatgtcttttatttctttctcttgcctaattgctctggctaggatgtccagcagcatgttgaatagaagtggtgagagtgggcatcattgtcgtgattcatatcttagagggaaagcttttgacttttcacctttggatatgatgttagctatgggtttgtcatatatggtctttacagtgtggggtacattacttctatacctaatttgtttagttgattttattatggaagatttttgaattttgtcagttgctttttctgtatcgagaggatcatatggtttttgattttttttttagatttgcatatgttgaatcatccttgcatccctgggataaatccaacttgattatggtgaatggcccttttaatgtactgttgaattcagtttgctagtattttgtgatgatttttgcatctgtgttcatcagggatattggcctgtaattttctcttcctgtagtgccctgtctggctttggtatcagtttaatgctggtctgaaaatatttatgtagctcaagagcaagattagatatagaaatgtggacttataagttttggggcagataaattgatagttgaatgttttatagacagggaaatggaatccacaaatgagtttctagaatgagaaaaggacaacatttgaaaggagggggaatgcaaagagcaagttaagacaatggagatgaccagccctgaccatacaagaacaagatcagagacaggaaaaagaagcaattaagcatactgcaggtaagtcatgtaaaataaaggcaggaagtgtagcttgggtctggagatttggagagcatttatgacttcccatttccccataggccctatgaatctagtagtcctggttcttacatggggagcattcctaccagagaacatgataaatataccactcaaagctatagctgctacctggtcactttgggctccttataccagtagatgaataagcaaagaaagaagttaacatattctctgggataatgtatcctgatcatcaaggaaagttaaggctgctgctaaatcatggaaataggcagcacatatattgcaaggagagtaaagttgagcaaaggcactcctacttctgtgccttgactccctgcccatgtgttctcctatttggactgtagaaccacataatggctattggtttaaagtgtattcctcatcctaaagtatagggttccatgctatagagtgtcattttcccactagcacctcagtggcaaatttgagtccattacatatttttctattgctggcagcttctggatggtgtggtggtcataggattagtgcactccctggctatttcctctacatcacacatcctttgctgtaaagtgatctcttggcctgagtaaatattttgtagattccaatttggttgtcatatgctttgagtttttggatagtgaactggctgagacactgtaggcaggaaaggcaaacccagaccaagaatacacgttaattccggctacagtaaacataacctttccctgggtgaaagggtccttatggaatcaacttgccaccgaatggcaggttggtctccttgagagatggtctcaactttgctttctgttgcaaggaggtccaacattcatcaacagcagttactaaatcagctttgaagagatggagcctatgccgttaggtccattcatagactctgtctctatcactgtggctacactgtatgtaagaccactttctaggcattaaggtggtcaagtatagagatttgctgacatatctggcccagtcatccttggggttctgtaggattcttctgcagtggattctgtctggtaggcacaaatgtacaatagaacaatccctgcactttgtgcccactctcataggttcatccatatgcctcttacccagaccttttcatacctggtcttccaatcttgtttatttcaaggctgtaaccagtcagctaggtaagtcattagtccttatatcccagttttatgccacttttcttctttccctaactactgtttttcagtgctactctgtggtacaacagcaattcattttcatcttacacccacacactgagttgatccatccatgtactaatcttgggctttttctccctcatcaacaggtcacaggaaacccttcatgaattcataggtgtgaaataggggagaagcattataacagtgacagaaagcatgcgggtttgtgacatatgtttgtgtatctttcttataccttcttacacctgctcaagtttgaccctgggcacatcctatccatgttatggttgattgctgctggggtcacctgattttatgatttgttggatctattggtatctgtggtgtgctagtaaatgattacttctgaaaaatactgccttggcttgtagcatttggtggcttctatggcataaatatgtctactatggctgatttcaagtgccaaactgatgtcagaatgtggagttaggaagagatgtgatggtatgaactgtctctagcacatcactatcttcagctggtgagagcagttctggtcacgtggtcacttgatgtcatttgagtttccatggtttgttactcattttctactggggcccaatggtatgccaggaattgtttatcaatagttcatagtcctgtactgtagatgtcatagccttgccctggaaccctagaagtgtgcactgtataaaacacattttgctactacaattaattccagtactataggtgatgtggtgcaagcaagagtcctggaccttatgcagacccatttgttgcctggggctcctctcaaaagttacacctctttgcatcgtttggcaaatagatcataacagtagtctcaagtgtattatatgttgcacctcaacatcaaagaggtctgctgaacattgtgattctctttcaaagctaggaggcaagatagtaatttgccctttactttggaatacatatcccaggatgctcagaacactcggaccctaagatgtttacctatggggcagcctcttgaatcttcctctagaacacacgtttctttccaaagcatccagaatacttgccactttttgcacatcaggcacggttaacatgacatcctcaatatagtggaccagtgtgatgttctgcagaatgtccagatgactcaaggctgtgctgacaatgttatgacaaagagcaggagaattaacacagccctggggcaagactgtggatatacactattatctgtttatgtgaatgagaacttcttccgatccttctttctgataaaaatgaaaaagaaaacatttgccagttcagtggcgacatacttttggtgtgcttggtgactcttggttaacaggtggtccacagtttttgcaaggccaggctcggctcgtgtattaaataggaccccattagggaccaccattcctgtctccttgaagacttggagggtggcactaatttttgccatttccttgagatgctgttatgggttgaattatatccccaaaggatatattgaagtcctatcccctggtatctatgaatgtgaccttgtttagaaatagggtggatgcagatattattagttaagatgaggtcatactggaatagggtggaccctttcccagtatgactggtatctttatcagaaaagggaaatttagacacagctatagacacagagggaagacagttatgtaaatctggaggcagagattggagttatgctgccacaagtgatggattgcctgggggctaccagaagatggaagagatgaggaagaatcctccttctaagactttggagggagcatagacctgctgacaccttatttttagatttctagcctccagaactgtgaaataaacttctgttgtttaaagccacttagtttgtgtactttgttatagcagccataggaaactaatacagatgcaatatatatactatatataatatatatgaatacatatacataaatatatatactatatataatatatgcatacatatacataaatatatataatcatatatatttataaattcattatcctcgtggaagtgtcttactggcatatccaggatcattctctgggcctttgctacaacaacagctataactttacaattcaatgaacaaagggttctgccaactgctaagtatgcccatcccaattgtacatttggaaattgtgcaaaggcccacccgtacccattgtgagacagacatggtttggactccggttgctagttgacttccatatacctctactcttagcaggagggtaatgtattagtcagggttctctagaatcatatatatattatatatatgagagcttattatgtattaacttacatgatcacaaggtcccacaataggatgcctgcaagcttgaggagcaaggatagccagtctgagtctcaaaactgaagaacttggagtctgatgttcaagggcaggaagtatccagcatgggagaaagatagaggctgagaggctagaccagtctctccttttcacgtttttctgtctgttttatattcactggcagctgattagatggtgcccatccaattaagattgggtcagcctttcccagcccactgactcaaatgttaattcctttggcaacaccctcacagacacacccagggtcaatactttgtatccttcaatccgatcaagttggactcagtattaactatcacaggcaatgatggtgtttgggatctttggctatcagcatcaatctgtattcacgtgtttggaaatatctgagtaatttacggattgatcgatggtgttgcaacatctttcttgtttttcagttgatgtgttttgggtcacagaactggctcaggcctaaaagctgagcatggaaataaggcttttcactgagcatagctgacctcaaacttctactctgccgtcacgtatctcttttgaatattcatattcaaatacccttattggctgcctatctatcttgcccctagggacaaaatgttctatgagccctttccataaattctgtgggtcatgccttgctgactcattctgaacttgctgtggattatagccttctgtccaccgctcttctattgggtacatgctgccacctagcctctgctcttctcagatcctatcatctccattgctattagggaacccactaccataacaatatctcacatcattattcccaggggtccttctgaccttattgccttgggcatgtcttatgggcctccctaaggaatatggtcggtacagggttttctgtctcatagaacggacccattgcttgcatgttgcttctgtgagccttttaagcccttcctccatcatttgctacagcaattctggcatctctattttgtttactgtaggcctttccttttctcaggctttcaaagttaattgtatcagctgattacagcaatcactggggctcttgccagggcattaaatcctgtgtcactggaaagtgccactatattgcaaaacactccctaacacagctgtatagcctatcttctcttgatttaaccccctgaggaaccacttccagttcctgatggtaacatgttatccatgtcttgatgtttttaggcatataatttcttttctgctttacctgtcccaacacttttgatcaggttatgctgagattttactctaattatgaaccaagagaggaagtggagcaagtcctgagaaggtaaagaaatgttatctaagatacctgcctcacttgatacctttgtataacttcaaacgtgtgtgtgtgtgtgtagctctgtcttccaataagagataattggtcacattttcaggtgcataggactcaggataacccaagatttgagattcttaactgtgtcgatacagatatccccatccaagcatcagggccccactcccttcagggctctaagtttgtgtaagagacctgcctagactgagatccagctttctctgatgcactgctaacaattaattttgttttctcttgttcttcaaccgtggctgccatccaggtgcagaagtggaagttttatttaaatagtgcctaggagttcctgttactctcactttgctaatttactttgttgattaatagacttgaacctgtcattttctctcttcaatcactggtgctgagcagtagccaaccaattccacattcttatagttgttatttcttcatatctctaaaacacccagagtattgtcgcagctattgcaccgcttccacctgtatcccatcacaggacagcataggtgaaagccagtaaaatgcaccagcattccaaggactatcaacattccacctatcaccagcaatagggttctcattatcatccagctggaaaatgatccaactccaggatccccatctttacagtctgtctcttagaagtgcttcttgtatcagtggtcatagattgggttccattcaggttagggatccttgtttaagtcacttattggggatgtgctcaataggggagtgagggaagcagaataggatggggaaaacgccaagcaagaatgtggtctcaggagggactagcttcagtctgatcctacaggacactggagcacaaattacacaacagaactagtcgtacatagagaaaaagaggctggccttgtgtatcccatgccaggaggtcattggctgagtcaaccctggagaagggagggaaagtggtgtatccacccaggcaaagtggcttccatctggttcagggcgattctctggaataggggtgagctgtttgttgttatctccaaaagtcacagcaaatgggagatggtacaaccagaaaagggaatgtgggcaaacaccagccacattcaccacaatattacagagctattaggaactataatgatcagcatgaagtttttctgtgtcctaggtaagaaatacatttctttaaaccgtctggaaatcttctatagtcttggataagaaggttgtgtttatctttcctcctttttagtggaattatactcaatcccaaatgcccattcactatgtttaacaagggaccgtcacgcaaatagcatctctcttcctggtctgctgtcaactcttcaagtctccacatcaaaaatgttattccctactgagttaactttacttttctctctccttacctttgttcttgcatataatggttgcagtgagggattatgagaacatctcctttcagatacgttgtcacattcagaattgtgtgatctagcatgagaaaggcttaacctttttcctttccatgtgccagtgaaaatttctttatactaatacacgttatttctgaaaaggggatgagagaaagggacaagagaagggatgatacaaaagtaatgtagaagtggccaagaataagatttggctttcctatttttttagtttgagtttggaaatttatgcattctttttgtttgtttttgatccagtaaaaaaagtgtcacctctcgtcaggacttcaatagttctgaagggtctggaagtaagtcattgtctcctgagttgatttaaggcagtttatgatgagagtcattctgttttttattccctaaaactctgagcatactgctgagtgaatagtctgtgctccacaactacttgaaaaatggtgatgcaggccaaagtgttttgaaaactgtaaaaatccatgcggaaatgaggtaatatgattgctttaaattgacctctccaaaggctctttcaccttttacctgttttacctgttttaccccatatatagatcccaatgttcttcctcctacttgatgcagaatgcctgtttcattttctcctttttagccataaaaattccaagtataattctagggcttggtttgaatcccactgtgaggaaacaaatcccgatactctaaggtttggcaatggaggatgaatatccctttagggaaaacgatggctgaaacctgtgggtttcactcgtgtctactgagattctcctaagggaccttcttttcttaggacagtgttttcaaagtgtagtccgcacgtcagaatattagcattactagagaacttgttaaaaatgaaaatgattagctctaccccagacctattaaattttgaaccctgattgtaggaccctgcagttcatgtttcagtaagccttccaggtgattgtgaggcccgctaaagtttgagaaccattgtcctagggaatcacttactgatcacttttgataccaccccattagcttcaggaagtcctcctcaacttagcactttacaccaaattaacccttaattgttgtggcacagtcaaaacatttaaactagctttcctacctaatgccttctccatcataaaaagaaagtgaattcctaacattaatgtataattaggccaggcgcgatggctcatgcctgtaatcccagcactttgggaggctgaggtgggtggatcacctgaggtcaggagtttgagatcagcgtggtcaacatgctgaatccccatctctactgaaaaaatacaaaaattagccaggcatggtggtgtgtgcctgtaatcccagctgctctggtggctgaggagggaaaattgcttgaacccagagatggaggtttcagtgagccaagatcatgccattgcactccaacctgggtcacaagagcaaaacttggtctcaaaaaaataaaaatataaaaataaaaataaacccaccagttttatagtcaggcaaactacactttgactcctgcttttcactcaaccacgttgataggaaggctctgcatctgttaaatgatggtaatagtaatatctaccttttaagactatggtggaaattaagtgagttggtgaatggaaagcacttagcaaaacgtctgactcataggtggttttcagtaaatgataacaaatcataatttagcttagtcatcatcatttcatagccccctatctgcagtgggtctcagagactagctctcaggccacctccaccgggcatggaacattttttacctttggaatttagaggcaaccctaagcatgtcttgggcccttagggtgtaagccaagagagaagcaggaattctcttctgtgtctaacttccactgtccaaattctaacttccactgtcttaagacccttctgtcacctaggatattgtttttgggaaacatcaggcccattcccaacatttacagggactgaagcaggagtacaaatggaaggcccacacatcatatatgtatttataatttacagagcaagctgaaaatgttttatactctgggtaggcaggatatcagcccacacaatcccaggaagctgtgactatgttacattatgagataaagggactttgcagatgtgattaagttcagggcttgagatggggtggtgatcctagataatctagtccgatgaaatcacaagggtctttataagaaggaggcaggagagtcagagaaggagatgtaacaaaggaagccaaaattggagttgtgcaaatccatgagtgaggtagtgggcagtctctagaagctgtgaaaaagcaagaaaagggattcttcccttgatccccagtgggagtgccttgctggcccattttagactgctgaccttcagaactgctccttaatatatttgtgttgttttaagtcataaagttgcagcaattagttactacagtgataagaaactaataaacctcctaccttcataacagtacaatttttaaaaaatgtgtacatatgtttttataagactgaaagttggcaaaatatcaatggtgattgaatttgattattattttgcataacaaatggtctttgaatgactcaataatatttgggtgaataataaaataaagaataaaataaagatacaatttattattattattttctgtttaagatggagtctcgctctgttgcctaggctggagtgtagtggcatgatcttggctcactgcaatctccatctcccaggttcaagtgattctcttgcctcagcctcccaggtagctgggattacagacatgccaccacacccagcttatttttgtatttttagtagatacggggtttcatcatgttggccaggctggtctcgaactcctgacctcaaatgatccacctgccttggcctcccaaaaagctaggattacagctgtgagccactgtgcctggcctcattaattatttttatctcataacacttatttttctttcctgtatttcagcacaatcatgagttatatggttcagagaacttgtttcttatacacagtattgccaaactaggccaccatacttgaattactgtagttcctagctaatatttttaaattattttcagtctggagaaacttggttctactgaggcagtagcaacctaattgtcattaaaactcttaaagaatactggattaagaaatagattattaagttatatatcacgttcatgcattataaggggattgtctatgatgcatgatctcatcatgatcttatcatgatctcagaaaaaaattaccaagtatttaacttaagcaagtgattactgttatgtatattttgcttttcaacacctacaaatcaatatctagatgcctagagttttacttaagtttcttttttcccccaatcttttcaatggtgaaatattagaagaaaattttaaaaacagaagtatgatgcttaatttgatcagttctctcactacatttgatactatttctaaataagaatgaccagtctgcaggttctcatttgtttgtgcatgaattcctttgtgttcatataaatattttctatttcctttttctaatttttaaatattttattgttgcatctcacatgtagtttatttcaatttagaaaaaagtgttcaaaatatttgcaaagactttgtattttttttaaaatgaagtagccaaacctagattgttagtgtttttataaacttctgccatataataagtggcaagcaacaattcatactgcatcaatttgtgattctcttgagaatcgcaaacaagaacacagagacataagaaaacagacgcttggcacttgtggaaaatggtgtgttattatacaagaatcttctgctttagttctgtcagagagggcagaattgagtaaatactttgtcttttcttttaccaaaatccttccctgtaccctggagccctgtccgtccatccatctcagatgttagtttcagcacagtcccgtaaaccttcaggcactgacacataaagaccttttgttctgaggactgggaagagagatgtagaaaagtgtttccctagggcgtggacagtttatactacatccactaaagtcaagtgcagttctgagggaacccttttatgggattttgcattctctacccatagaaatgtgtctttctcctcttattggaaaaacaacaacaaaagcatagaaatagtaatagaactcaccgcaacagcataatgcaccaagtggcacatgtgtgcacactgacactcacacaagtgaaaaactgaagcaagtcgcccaaatttgcatgggtaacagatttgggattcgagcccatgtctacttcacattgagttcattctggtacgtcatcttgcttcctcaagagcagggtgttatcctttctctggtttatctagcagcttacctgtatttgtcactcaaaactgactcacatttcacctcctggggaaggtgccccaattcccttttgaactttctacagtaacatgctcttcagtcatttatagggttacgtgctgttctcacgctggcctctgattctttgaggacaaggactgtgttttactgctttctgcatttctgaggcctaagagagcgcctggaatatattaggagctgaaatatgggataataagaaagctcttaattttaaaaaagaaatatgctaccactataattcagcatattaagcaataagtatggacatgaaatccagaagtcacataaattcatctttaggtcccagattgatagctgctgggatatttttagagaattttgaaaagattccacagttttcttcagcaatttattcaaatatgggccattctatactgtcagcaaattctctctgatatttaacctgaagcagtaacctataaatggtatgctgaggctctgagagagctggtataattgccaaagttgcagtcttactactgggatatatttaaggtttgggaaagtcttaattcagcacattttgaagagcagtatttttagttccttgggtgaatggtcctgttttaattcaggaaacaaaaggtgctggtttagctaacagtttgatttcaatctctgaagcctttccaccaattattttctttttcaagcaaaatcaatctttcctccatgttctcaagtccaatttatttaaaacacacacgtacatgtctgcaggcacacatacatacacacacatagtattacagtacaactattatatactgttttagatgtagatatagaaagaagtatagatatagattgcggtttcttgagtttctaagagtttccttattgtttgcttctccagtgactttgcaataacctagcaaacttccagtaaatgttcgcgaaatacgtgaatagtaaatgagagaaatgaggtggagcttgaaataatcctgccacctttgttcctatcactgtaaatgttatgtatacctgtctcttttcgtagaaagtcttgcacatatgtacccggagaagagacagtcattggtgtgattgctgtcttagagggtatgctcagcttgaactttaccaggaaacaacaaattatttttgaaagtgattgaaaatttatactcctaccagccatgtataaaggttcctatttatctgtgtactctctgatctttgatattgtcagacttaatttttgccaatctagtaggtatgtacaggtatctcattgtgactttactgaagactggacaattttcagatatttatttgctctttatttttttattttctgtgacatctctgtttagcttttttgttctcttttgtttttcttctttattactgatttgcaggcatttttacatttatgtaaatactaatattttgtctcaggctggcttgtctttttaccctctttctggtgcttcttggtggataacattcttcattttgatgtagttgaatttcatcacccttttattttatatggtcaatgctttgtgcttaaaaaatcctttcctaccccaactttataaatatcttttcctatattttctctaaaagttttaaggttcgccaccattcgttgactgatctttctctcagtaatttccaatgccatgtctgttacacagcaagctatcatttatgcaggggtctgattctgggctctctatttgtttggcctgtgtgtctgtccctgagcctaattagtaatttatatcagtaaggcattttctcctactctgtcactcttcagaaatggtgagttcttcctgctcctgtactcatcatgtaaattttaaaatcactggttaaattttatgaaaacctgttataactttcattgtaattgtattgaatttagaaagccatttctggaaattggcatttttttggtattgtgtcttcctatctattaacattctgtatttcttgatttatttaggtctgtcaaagtctttagaaaatatttataattattattcttaggtcttgctcctctttgttacattacttcacttttgctactattgtaactagtatattttaaaaatatatattttcaatctgtggctgatcatggaaataaaattagattttatattttgacattacaaccagctgtttgttattgattattatgcataataacttgtcttgagaatcttttgtgttttacataaaaatccattttctgcaaatattaacactgtgtttcttcccttctaatctttactcctttaatttttttcttgtaattgtattgggtgtttagtacagtgctgaaaagaagtgctattatagtcatgctcgtcttgtttcatattgtacagggaattgcaatcagattatgtctgttgtaggctttttatagatgcatttgattaggttatgggcgctttttgcgttcttagctttataagatttttaaaaatatgcttgtgttggattttttttaaattatatttttccctgcacttattgagatggtttttttaaaaaatttattgatatggtgataaatatattttctaatgataaactgccttttccttcctaaaataagctcaacttggtcaagatatattattatggttttaaatttatatttggaaagtttgcctatattttatttaatttttttgcatctagtttcataagtgaagttgactgatatttttttcccacattgtggtattttaaaaagtatcaatgatatggtaggctcttagagtgacttgaagattgtgccctctttttatcttttggggaagagtttaaaatttataaataatgtggtaggattcacctatacaatatctgggtctgatattttcttcatgggaagattttttaaaactgtgattcgtttttaacctatttaaagcctactctttattcttaatactgttttaatgttatgttttttctaataatgtgtccattttgactaagttttttagtatgttggtataatgtgatacacacacacacacacgcgcgcgcgcgcgcgcacacacatacacacacgcaaaataccatagtgttaccttatctttttaacctgttttatctgcagttgtatatctgcagtaatctgcagttttgtatctgtagttatgacttatatagttatatttaaaacttcttttgaaacaaatgttcgtaactgcatatcagaaaagtattacagaaggtatttaatcatttaaatttgagtgtgttctgtgcttcccagatgcagaaataaaatattttcttttgttttattttccaacacaagagggcagcattgctgcactgttaatttcctgtaggctaacaccgctgtgccttgtgtaggtttaaatatacagcacatctctttcaaatggataatcatttgaggattgcataaatgtggaccttgtctatttttcacttacatgacattcattgaaatttagttttgaaaacaatactctctgattagcatttatacatgttttatatttgcttcattgtttctgattctgtaacaatcacctcattctgagaagactaggtactgttgtgtttgatagtgtgtatgtatggtaattttctagaaatctgaatttttttaaatgggcttttcaatgatattactgagaaataggtagggtactattttgacataaaggataaagaacccacaaagtccatgagcttcctgtcggatatgagagattaaaactgctgctgactacaccaccaggtccatgtcaattaactcatttgcagatgggaggtgagagtgcaaaaataatattaacattaatattaagtaccattactggctactcattatagcttagattctttatttgctctacttagatttatttttataacatcatcctgtaaagtaggtattattacccccatttttacagatgaggaggcagaagcttgggttggctaactcaccccttagttcatgagggtcagaagagggtgctgattaataaatccccaggctttctcactactgcacactgcctcaccatcaacagcaaaacaggttgaattcgacgattcagtaaaaaagtaattttgatagttgagttcctttatcccttaccacgtctatttcacatatatgattattattattttggtagagatgaggtctttttatgttgttcaggctggtctcaaactcctgggctcaagcaattctcttcctcctgagcctcctaaactgcagggattacgggcatgagccacgtgcctggctcacatatttgatttggtctaggctatcttaacaaaatacaaaatgctttgtaaagtctacattttattattgcatttgctatttttagctctttatgtctgagcaattgtttaatgcctgtgcctgagaatctttttctcaacaggggaactgcgggggagattccagaagttccttttagagttgttgtttcactgtatcagtgcatcggtgactgagaaggaagtatttgcttttgtgtggcagcgcagtaaattcgcagaacacagttccaagaagcccaaggcactagcaagaatgataggtcaccatctccattatctgtcggtggtggatatggaagatagcattctatattaacttttgagaaagagaaagttaggcaagaagagattgctgaaatagattgtctgtgattgctgaggttgaaagttttttattcttggccaaggaatgtatcttttgggtttaacatcactttaggagtcagacagccttgaatgttagactgagctttgcattttttaggtcatgactttaggcagattccctgagcctcagattcatcatctgtgaaagaaagataagactaataccaatttatccaggctaaaaatatatataaaaatatattttttcaaacatacacattcaaaaataatgaccatatttttaaatgctatcctacgttgtgtcaagggcaccagtttctaacttagagacatttgcaattttgagcagtgtcttctgaggccactgggtatctctagaaagcttgaagtttaggagtaaacagaaaaaagcttgtgaacatgctttataaactgtaaagatttgtaaatatataaaatcattataatggctcctctctctgaactcaacttccactggatacatggcatatacttttgcatgtatcaacttagctcaaatcaataaaaaacatttttggactcctggtaagtccaaacatttattcattaaaaaaattattagggacctaaatgtacactgttttaggcactggagattggacaagaaacaaaacagatgaaacctttgcccgtggagcttgtatttgtagaggtgacatatgtggatcacacataggtaggatgtttcataataatatagagaaaaataaagtctaggcaaatggctagagaatggtggaggcttgctactttagatggaattgtccaaaagccttctttgaagagggaaaaaactgagcaaagacttgaatgaaagaaagaaaccagccatacatctgtctagaaaaactgagttattggcagagagaacaaaaagtcaaaggccttgaaatgaggatgtgtgcctggtatgtttgcaaaatggcaggaaagctatggtaaaccatacaaattattgggttttccatgtaatccattgtctctttgagagacgatatctattataatattataattttatagctcctcttttataggtgttcataataagaataaagataataattagtactttttgagtacttgccatgtgctatatttgtccttacaaccctcccaaataaatataattatccaccattatacagagactctaaatagctttcctaaggtagcatattcaataagttggtgaggcaacggtttgtcttatttcaagtgcagggtgcataataactcaatgggaagacagatgagtgaaaaatgcgtagtaatgtcagagggcttatgaaaggtacctagggaaggtgtcatgaagttacttagggaaggtgtcatgttatgccatagaggatcagttccttaaggaaggagaagatggattgggagtggagagagaatttcctgcgagaaacaaaggcatgaaggcttgaaagagcatggggtacatacgcagtaaataacaaacagttaagtgcggctgaagagtctgtagcatgcgatttaacacagatgcttctccacttataatgagattacaacctgataaacccattataagttgaaaatattgttagtcgaaaatgcacttaatatacgtaacccacagagcatcatagcttagcccagcttaccttacatgtgcttagaacatttactttagcctacggttgggcaaaatcatctaccacaaagcctattttataataaagtattgaatatctcatgtaattgattgaatactgcactgaagtgaaaaacagaataattgtatgggtactcaaagtaaggtttctacagaatgtgcatccctttcacaacttcctaaggtcaaaaaggggtcagttgaaccattgtaagttggggaccatctgcagacatgctcaggtgctactttgccaggcagggtctgctactgtaacataagacacctcccagccatggctgattggacagaggtggaactctgacccacaggtagcagaatccactgttttactagggacataggatgtgtgtggcttgactcaagcagctgaggtgactgaatcagattctgactttcaaaacattgaagcaaggatgcagaaactgttgctagtccatgaagggccctgggatagggagattatccaaatttgggtggctcaagaggtcattgggccatgggaaagctgattaggaagctatctacagaaagagaaaaatggaacaagtacagagagaagcaaagatggaatattatgaaacctcggagagaaatggagagcagcagatcctcagtttctgttgcatttccagttctttaggcctcacgaggcaggtctatgtcctgtcctagatcccagagatctttctatcccaaaattaggggggccatgtaatttagatccaaaatggcactcttttgaaagtgaaagtggctgctattaataattacagacgaaaacctccaaatcactgggaaaactgggttgtatgtggtggtgggctaggaagtatttaacaactgggtccccaggaaacaacagcaacaacaagccagaatttgattggtagtgtttgtcgatttccatgttgtaaatactctcaccatagctgatttccagctaccaactggcttggaaaattcctgaaaatttaataatcacctttctcaagatgcgacaagtcagctcccgtacaccactggatgcatactgccttacctaaagtactctccttctatactaaccccctgcccccacctttatttttacttgggttttgtgagtttatttgaaccttgcaactccaaaagcaccgattagaacagtagtgcgtttggccctgcgactgcaggcagtgggaggcctgcctacaagcctgccctccagctccttgaagagagagactattttaaacttccctttcctccccagcatgcccagcacagcgaggagaatgtcgcagctgtcagtaaatgcctactgcattaatgcttgaggtgtccctcattgcacccctgcagcaaggttggccagctgtgatttacaatttgcctgtcagcagtgggaaagtaactttgtgacagcagcaaacaccagcttctcagaggattttgagacctgggttctgacatttttacctagatgtgattgttgtcagcttatcatcccctgtcaagttctaggcttccttgagcagaaaatgaagtttattaactcagttatgggatgctctgactctttagccacatgggtgctaactgcttgatcagtgcctctccttagtgtgttcacattggcctgaggcgagccctgtcacactcattcttccttcttcaaataacacaatcattgccttccaaaaagcagaatcatccatcctgttttagaaacaaactggttacccaaactaattagctgagcttggactgtacaaatacctttttacctggaatccaggtttttctttacattttcctctcttttatccctatttatgcttgtatgtaaaaatctttatacatttgcagaaactggtaaattatcagaagaatttggtttctgtcagctttcctaaaagcaattattttccctgtttctgagaagtgataagaataaaaaatatttcctctgaactttctgaatatattattgttaaatgattgatataacacttacactgagaaaaaaatttattccaggtcaggcacatgggtgagctgacacacacatatactttcttctctagcagttctcgggtgaaagagaatcaggtgaaatgagaattctatgcttgtactaatactgtcttttaaagttgtttatttacaaaagtcttcccaggttacatgccaagcaataaaacggttaaacaattaaaaggtttccaagacaacttattgcaaagtaccataaaaagtcagctatgatatcacacttgtaattgaagactctaagtctcagctttcagtaagcatgcattagtatcaagaaggtcaagattcatggattctggtatttttggttatggcaagagaaattaacttttataaaccatagtgtgaaaatcaattcaccagaaaactctgtgtgtttacaatgtgtccattaatgtcctggctaatgtaaaatgatgaggacatgagtctaagtaatagatgttcataaagtggaatatatagagatgtttctagagcattatttaaattttgaaaaagaataacaattctacatctccagtaagtgagcatgatttaatttggacagatagtgaactgctatctgaccatttaaaaccatgttgtagaagaatatttgctgctgtgaaaagatattcagaatatattgctaagtggtgaattcagctacaaaacactataataacaatttttgcatattgtgtatgtgcatgtgtgtgtgtgtattacatataggactagaaaaatataataatttaacagtggttatacccagtggatatatctggggagagtgattaagtcatattgctctatttgcctatttgcatttttcactgtgctgtttttactgttgaagcacgctcggctgttttagttacaggagaacttattctcatgagtgtactgaattttgaaggggatagaatcttacacaattaactaaaatgagacatatatatgtgccaaatgtatggtgtagggtcctgtaattcattacattcctgcccttttatttagggacaggttttagaaaggtgagtgggggtaacctagaggagtgaaaacaccttgggtaacatgaattgatgcctgcttaaagagttaaggcatttcctcccccccccatggaaaaggagaacaaagcttttactgtacgattaattagaattcagctttgcatagtctgtggttacaaacttcagtgaaattggtgcaggatcctattctcaaagggttacaaagcacatattgttgtcaaagtacccagtacagaaagatagcatcctcagaataaaaattaagtacattttatatgaagcgatacacattagacactttcataggtttaaatattaaacagtggtgaacagttccaggaatcttgtgatttttttttttttcataaaatgaatgcccttatttcccagaaatccaagacttaacatttcttaacagcttatctgatgggaacaaacccaaactggcatgtaaatattatcaaccaggagggtttccaattaatagatcaaggtaaaacaaaaattacattttattcaacttttgccactagtgcttagcacagtgcatagcgtattattggcactcaacaaaaacatgcatatttttctttaagactgttgaataaacagaaccaacgacaaaaatcacgtgattatctcaatagatgcagaaaaggcctgcaacaaaattcaacaccccttcatgctaaaagctctcagtaaactacgtattgatggaacatatctcaaaataatgaaagctatttatgacaaacccacatccagtatcatactgaatgggtaaaagctacaagcattcccttttaaaactagcacaaggaaaggatgccctctctcaccactcttattcaacatagtattggaagttctggccagggcaatcaggcaagagaaagaaataaagggtattcaaataggaagagaggaagtcaaattgtctctgtctgcagatgacatgattgtatatttagaaaaccccatcatctcaggccaaaatctccttaagctgataagcaacttcagcaaagtctcaggatataaaatcaatgtgcaaaaatcacaagcattcctatacaccaataatagacaaacagagagccaaatcatgagtgaactcccattcacaattgctacaaagagaataaaatacataagaatacaacttacaaggtatgtgaaggacctcttcaagaagaattacaaaccactgctcaaggaaataagaggggacaaaaacaaaaggaaaaacattccgtcctcatggatagaagaatcaatatcatgaaaatggccatactgaccaaagtaatttacagattcaatgctattcccatcaagctaccagtgactttcctcacagaattagaaaaaattactttaaattttacatggaaccaaaaaagagctcgtatagccaagacaatcctaagcaaaaagaacaaagctggaggcatcacgctacctgacttcaaactatactacaaggttacagtaaccaaaacagcatgatactggtaccaaaacagatatatagaccaatggaatagaacagaggcctcagaaataatgccataatccgatctttgacaaatctgacaaaaacaaacgatggggaaaagattccctatttaataaatggtgttgggaaaacaggctagccatatggagaaagctgaaactggatcccttccttaaaccttatataaaaattaactcaagatggattaaagacttaaacataagatctaaaaccataaaaaccctagaagaaaacctaggcaataccattcaggacataggcatgggcaaagacttcatgactaaaacaccaaaagcaatggcaacaaaagccaaaattgacaaatgggatctaattaaactaaagagcttctgcacagcaaaagaaactatcatcagtgtgaacaggcaacctacagaatgggagaaaatttttgcaatctatccatctgacaaaaggctaatatccagaatctacaaagaacttaaacaaatttacaagaaaaaaaacaatcccatcaaaaagtaggtgaaggatatgaacagacacttctcaaaagaagacatttatacagccaacacgcatatgaaaaagagctcatcatcactggtcattagagcaatgcaaatcaaaaccacaatgagataccatctcacaccagttagaatggcaatcattaaaaagtcaggaaacagcaagttgctggagaggatgtggagaaataggaatgcttttacactgttggtgagagtgtaaattagttcaaccattgtggaagacagtgtagcaattcctcaaggatctagaactagaaataccatctgaaccagcaatacccaaaggattataaatcattctactataaagacacatgcacacgtatgtttattgcagcactgttcacaatagcaaagacttgaaaccaacccaaatgcccatcagtgatagattggataaagaaaatgtggctcatatacaccatggaatactacgcagccataaaaaaggatgagttcatgtcctttgcaggtacatggatgaagctggaaaccatcattctcagcaaacaaacacaggaacagaaaaccaaacactgcatgttctcactcataagtgggagttgaacgatgaaaacacatggacacagggaggggaacatcacacaccagggcctttcgaggggtgaggggctgggggagagataacattaggagaaatactaatgtagataatgggttgatgggtgcaacaaaccaccatggcatgtgtatacctatgtaacaaacctgcatgttctgaacatgtatcctagaacttaaagtataatttaaaaaaagaaaaaaaatgcatacttgattgagctagaaaatgtgcttgtctggaggtctctaatctgtgttgctaatacatagaatgacataatagaaagactatggaccgagaaaccaatactcagaccagctgcgattgagttctaacgccagctcttctgttaactcagtgtatgggttcttctccttgtggctccatttacccatttgttaaaaagaggattggactagattaactctaatgagagtatctttcagatcagaatacctaagggtttcttttctttctctattgccaaagctcatgtatttattaatgtattccacagatgcttattgaatgtcttctctgtatgtcaggcattgtgctatgtcatgcagaacaggcctgtaaacaaggcacacacagtccctggccttggggtcccttcctccagtgagaaagttgtgttccctcctactgggttgactataattttttttttaattcactcattgtttaaagcaagatcttagaggaatgggaagttattcttattgggagaattgcttgtcatcatagagttctctttgatgagatagagaaatttagaaagattaaactcctaaattgcatttccttgtgaattgttgtaatggaccagaataaacacaaatttggtgttttctagcattttagtgacagtgtgggtacacctcacattacaatgtaaatccattttaaaaatgcagttagtaacttatgttttattaactctcgtatttttagagtaccagagtaaactgaccgtttgaaggaatgcttcatatagtgagtcatattgtcatgtaattatgacccaacctatatttttatttcattaaaggacttttcttaatgcaaagcatctttaaacttccatgtaaaggagataattatattaaaatattcataaccacattttgacacagcattgctcgttttgttcctttgatctaatagtttgtagaaaatagaatgtaacaaattatctcatttaattttacctgagaaacaccgtactttttcagggtgtataagtcaggataagctggctatgatgctataacaaacaactccaaactctcagaggtttaaaacactataggttttcttcttgctcatatgacacattcatcttgggtatggatgaattggactgatcacaattactctggaacccaggctgacagccgccaccatctcaaacattttcatggtaagtgcaagagagcaaaaagagctctgagagggtctcactttggcaaagaattgtgtggttatatccagttataaatcactggctagaattagtcacatgctccatattttcacagaggggcaggaagtactatcctaccatctgcctaggaagaagacagctgggacacttgatgaataatgctaattactaccaaacacggtatggaagagttgttttcaggcattagctcccttaatttgctagagaatcaattaacacttggttagcttagcaatgtatttagttgaaaaaacttttttctgaatatttcaaagcactaacttttttgagaagatctactgcattgtactacatattgctggaattctagcaacatcttcaaattttagatttgtgacaatatttgtaatgatatgtattttatacttttgcccatggatattaatgacatttttactgtgattctcaaaagcattaaaaaagaagaaaggttaggtcatataaatggtatgattagttttgtttctttatttctttttcccttggtgtttttttagacgcagagttttgctttgaattgctcttccagtattattttgagagtgctctactagtgcttactcattttccattctaataacaattctaagccagaacaaataggaatttatcagaaaattatggtccactctcaactacttctaaatatcaatctcaaaagttcatttaataattcaactttcttaggtatagtaataaacaatgtataagtgccttttaatatacatcttaaagtattatttttatatttattaatacttgtattcatttataaatttacttatttaacaaacttttattgtactcatgtagcaggcattcaaactgatttagtggtttaaaatatatttaattgtatactaagaatttatgagaatttacaaatattttctttttttttttttctaagtaagtttgttgtgctttaaaggttgtacggttctattcttccatatgaaactgacaatacaaacctaaaaatgggaaatacattttggactacatgtccagaggcaggggctagactaccttctttcctatggctttttgcagaagaatgatacatgtatttggaagataaatggcagggaggtattagtgtaatatattgctgtcaaatattctgggattcatactttattcacttaaccagccaaaagtgactatgtgtttacagtgggtcttatgatttggtaaggacttaaaatataaagattaagacatgagccatattctcatggagttcacactcaactgggggaaatagatatgccaatatacaattaacaagtatataatgtaataagttctatggtaaaggtatctactgagcacaatggaaataccaaccaacctggaggcatcagtgagatcttccaagaatggaagtgacattcgattaggtcttggggtgaaatacactggggaagaaaggaaggagaacattgcatctataacaagcaatgcatgtataacaagcagcatgagtgactaaatgagtgaacatgtgaaaaaatgtgcacctggaggactccatacatgaggtgtgcggtgcagtagcaggaaatgaggccaaaggaaaacccgggtctggacaggacgggatcttggcttgagtttgcctcaaataagaaaggataggctaaaggataagagaggagaggctaaagagcttctggagaggcattaactaaagggattggaatttatctagtaggcatctgggatcattgaattgtataaagcaagagtgacatggtcaggctgttatattcaggaaaataagtaattgtagtgagagacagagaggaataaattagagacagtgaagcctggaggcacaaaaacttacatcttggcttcatcagcttaatttgccagtgactagacgctaggcaattgagataggtgactaatttttgtactttaatttataatattatgactatgtgcttagaaaatgacacctggtcctttaataacttgattgctttttctatataaaacatctccattaaattttctttgaagtaccaatgcattttctagaaagcagaagacatgttaatagcagcgattgcctttctctgctatgaacatctatgtggtactaagtagttatttaggcatctctattaatagacagtaataggtatgctggggagatttctaagggaatcatttcatgaagcaccttatatgactttaataaaaaacccattaatgaataaaggaataagttgatcaagtcacacatttgtagccaccagcatagtttggagaatgatatgtagtggaagtgaaatgaaaatgctgagagtgatatttattccaactatttccgaagtagaatatgatagtccctgaaaatattcagagaggatggtgttatcagcagtatgagctgtttttgagaaatcgagaatgtaaatgagggagaatgattcatgccaaaattgactaactccaagtaatcatctctagaatgcttaagtaggtattttgctatattcctgtagctataacaatatatcatttgaaagattttcagaaatgagcatcattatcaataatgaaaaaagtaggtcataatctctttttcctttggacttttaaatgccaagtcttgtatcttatgaatataaaatccattatctgtgttaccaagatatatccatcattattgcttctctctgttttgaaataacatcatttttcctaggcagactaggtagattctggtataaaaaatttggtaatatattatgactgtgcatttattggattttatgtttattttaaacttatatgttttgatttttaagtttctaaacatttaggtcccttgcactttcgcatagaagtgtgttttaatgcatatgccttgtggtcagatagccagttgttttgggaatcagtttgccatttagacactcagtcccccaaaaggccgggagaatattccttcaaatggcccactgggcaaatgtgtacacttctttatcttgccatattttggagaggatatttttttgtcaattgggattatgcatttgttagagcctgtgagttcttgggagatccgtgtatcttagctttttgagttttagaattttttctcggtataacattttaaaggttagattatttgggaagaggtgtgataaagctgaatatattcctgtggaagaaacaatttgtaatctggattagctttctttgacggaaagtagttttggccaaaaggtgacaatattcttcaactggtaagtgtggaattggatgagagacacaatcaatctgaaggtgtatgctgtttaccaaaaagtagactagaaatggaggaaaatgaggaattaaattctatctaatatactctgattcacttagtgtttctgcataactatttctggacattattttcaattttttcctttatttagatgcagttccactgtaactagtcttactacaagcaagccttttcagtaaagagaggagaaaatatactctactgttttttatttctttggaatcaaatgtttgttgaatgctacattgggccatgcatagagttgaacatgacaaattgttgctaaagaaaattctagactggtgaataatttgtcttgaatgttttttgattgcatttaggtaaagttgttggagcaaagtgttctgttggctgcaaatctatccattctgtttgtttcagaaaaacccagggctagccagctttgagcattagttaattgacaatattaggaaaaaaaatcagctccagaaccatttccattgattgggaagacacacagaattattccttaaagtggtcccatttccatagaaggaaactgaaggtaaatgagtgacagaattgcttcaacccacagataattatgaatgaatgtagatttactaatgtaggtactcaaactcagtgactatgtttatattgatatataaaatatatatttatctttatgattttatgtataaaataatatatactgtattttatagagtaactgatttttagaagagacattttggttggagaaagatgtttagagtgagacagctgggtttgaataaaacttcagtacttagtatttttcagctttgaatctcagaacaagagtttctttgaatgtacaatgggagatgaaagtacatatcatgcaaagttgttactatatttgcaaacttggacacaatagacacctaggaattggtagttattatccttttgctactaatttatgtttaacaaatattccagcgctattgtgatcagaagactgcaggaaggtattgtgggaaaaacactaaaaggaacaacacaagatctctctctttaaaggactttgatacagtttttgaagagacagacacattcatacatccaataaatcttaaagaattctaatctaaagcatacaaaacaatgcaaaaccattataggacataaatgtagcactgggtttttttttttcttttttctcttgagacagtcttgccctgtcacccaagctggaaagcaatggcacgatgccggctcactgtaacgtccacctcctgggttcaaacaattcccctgcctcagcctcccgagtagctgggactgcaggtgcatgccaccatgcccagctaatttttggatttttagtagagatggagttttgccatgttgatcaggctggtcttgagcttctgacctcaggtggtctgcctgcctcagcctcccaaagtgctggaattacaggtgtgagccactatacctggcctggaataatttttatgtcaccaagatggaaattttagatcacggttgccctcttttccaatttctacttagagatttcctccttacatgtggcgataataaagtacttttaataaactaaaaaatgttcttaaaaaccattatcaataattatgatgtgatcaatgacaataaatagactatttgtaattatcatggattgcttcaacctgattctatattaaggtctcattgttatttctaataaactactgattgctaaagctgcatttttaagttggctcattatataggaaatattcagatgttaacataactataggtgctcatagttgatcactctacaatgcttgggtgttgccattcccttctccctgggtcatggcagacattacctattaatcaaggcatctttgtttctattcattgcagtctcacaaaccttctcatgtcagtgtgatatggtttagatttgtgtccctgcccaaatctcatattgaattggaggagggatctggtgggaggtgaatgaatcatgggggtggaatttcccttggtgttcttgtgatagtgggtgaactctcacaagatctgatggtttaaagtgtgtggcacttcccccttgctctctttctcttctgcttcaccatagtatgatgcgcttgcttccctttcaccttccatcatgactgtaagtttcctgaggcctcctagccatgcttcctgtacatcctgtgaactgtcagtcaattatacctctttttttcataaattacccagtctcaagtagttgtttatagcagcataagaacagactaatacagaaatttgatactgggggagtggggcactcttataaagacagctgaaaatgtggaagcaacttttgtaactgggtaatgctcaaaggttggaacagtttggaggactcagaataagacaggaagatgtgggaaagtgttgaacttcctagagacttgttgaatggttttgaccaaaatgctgatagtgatatggacaatgaagtctaggctgaggtgatcttagatggaaatgagaaacttattcagaactggagtaaagttgactcttgctatgttttagcaaagagactggtggcattttgcacctgccctagagatctgtggaactttgaacttgagagatgatttaggctatctggtggaagaaacttctaagcagcaaagcattcaggatgtaacctggctgtttctaaaagtgtatgctcatatgcatgggcaaagagattatctgaaactggaacttatatttaaaagggaagtagagtgtaaaagttcagaaaatttgcagcctggccatgtggtagaaaagaaaaacccattttctgggtagaaattcaagcctacttcagaaatttgcataaggaaagaggagctgaatgataatagccaagacaatggggaaaatgtttccagggcatttcagggaccttcactgcagctcccattacaggcccagaggtgtaggagggaaaaatggttttgtggacctggcccagggccctgttgctgtctgtagccttggaacaaggcaccttgcatcccagacactccagctccagctgtggctaaaaggagccagggtacagctcaggccattgcttcagggggagtaagccccaagccttggtggcttccatctggtgttgggcttgcaggtgcacagaagacaggagttgaggattggaaacctccacctagatttcagaggatgtatgaaaacatctggatgtcaaggtagaagtctgcttcaggggtggagccctcctggagaacctctactagggtagtgtggaggggaactgtggggttgaagctcccacacagagtccccactgagacactgcccagtggagctgtgagaagaggaccactgtcctccagaccccagaatggtagatccatcgacagcttgcaccatgtgcctggaaaagcctcaggtactcaatgccagcctgtgaaagcagatgtaggggctgtatgcagtaaagccacagtggcagagctgcccaaggccttgggagcccaccccttgaatcagcatgccctggatgagagacatggagtctaaggacattattttgcagctttaagatttaatgaccaccctgctggatttcagactggcacggtgcctgtagcccctttggtttggctgctttcttccttttggaatgggagcatttacataattcctgtaccctcattttattttggaagtaattaacttgtgtttgattttacaggcttataggcagaaggggcttgccttgtctcagattagactttggacttggacttttgagttaatgctggaatgagttaagactctgtgggactgttggggaggcatgattggttttgaaatgtgagaaggtcatgagatttgggagggtccagggatggaatgatatggtttgggtttgtgtccccaaccaaatctcatgtcaaattggaggcgggacctggtgagaggtgattagattatgggggcagatttccccttggtgttcttgtgatagtgagtgagttctcataagatctgatgatttaaaagtgtgtggcacttcctgcttatctctctgtctctcctgcccacttgtggtaagacgtgcttgcttcccatttaccttccatcatgatttaagtttcctgaggcttcctagcaatgcttcttgtacagcctgcagaactgtgagtcaattaaatctcttttcttcataaattactcagtcttaggtagttctttatagcagtgtgagaatggactaacagagtgtttcaggtagtcacagccaactagtttgacttgacacatgtgataggatctatttttcatcccatcataagcatttttgagtttgagaaagttcacactcactatgttaactgaagctaccttgtagccctgtaaatctatttttaggaaacttgatctactagttataattctccctttttcttctggtctcattatatgctagaattccttgattatcaactctgaaaacatggcagaatgcagtggttcacaaatattggtgtgcatcagattcacctgaagacttgttaagggatttctgggtcccactccccagagtttctgattcagtaggtagcaatattttaaacaggtttagaaagcttttaagagatataaactcaagtgatgcctttggtgccaatcatggagccacatttggagaactactgacataatgaaaagaacatagacttaattacagagaaaaaagcattgagagcatcattactagattcttgaaactcaattgttttcaatgaagttttcccaataataaagcctgtatcatggaattacttgaagcattacctgagaaatatttcaaatatttagcagtaataacccctcagtgaatgtacattcactgtactttttgtactttgtgcactttgtaataaaaaaatcagatctaacattgttctatgtaccatagggaaatggagatggcgatgtatagttcttgttctttcttccatgaactgttgttacatattctaatcttcagaaactcactttgtgttatcctatacagcataccatatttgctctttgctctgaaaagcttgctttaggcactaaggagaaagttttacttttttactttgagtttggagaagtgcacaaatggtaatccagcaggtaactgtgtataaaagctgtggagccacattaggctgggatttccctctttacaggtaatatttttaaatgaatgtgataatacttagagcatattttacatcctgcaaaggagtatactattcaaatatttgtgccagattgcgttgtaaatgcagcaccatttaattttaatttaatttaatttttaatttttttttttttttttttgagatggggttttgctcttgttgcccaggctggagtgcaatggtgcggtctcagctcactgcaacgtccgcctcccaggttcaagtgattctcctgcctcagcctccagagtagttgggattacaggcgcccaccagcacacccgggtaatttttgtatttttagtagagatggggtttcaccatgtttgccaggctggtctcgaactcctgatctcaggtgatccacccgccttggcctcctaaagtactgggattaccagtatgagacactgctcctgggtgcactaccatttaattttaaattttcacttattagttcacttgaattgccctgaagaatacttggtccgaacatttacatctatggataaggcactgagaaacagaaagcctgaaggaatttctcaaggatgatgaagaacctggcttaggtttgatctcaaaacacagactccttataaataattcactcacttaggtcattctcctccatgattgctcttcagtttaccagaggtttaatttgtttccccaagtattttcacatgcagattctttatatattactgtatttttgtgcttagtaatcttaataaaaatatcaagagtactgtttaggaaatatgttatctatggcaaaatagttcttaattataatgtagtgtttttggacagtataaatgatagcttagaattgaaaagagaattactatgcttaccataaatctccttgacaacaagttcaatgttttgaatactgaatcatttagaattttatgcagatttataggtctctcaccttggcatctcattccttttttatacatctgggattttaacagatgtataaaatctgttataattattactgctttatttatccccataattgttactgctttaacaaatatttttggccgtccaactcatttgtatttgaaatgtttgcctagtttttactatcatcatcatcatccatcatcttcatctttcttcaatatttattgagctttgaaaaactgtgaaaatcaacttcaaagaacatcttgattactttactgaaatgaaggtccttattggaaccctcactccagaaaaaaagaagtgattcacagattctgggtcttctttctaagggatatataatgtcagttaggcagttaccatcccccaaactgcttgcttctcattttgtaatgaaaagaaagctctctcagcatatagtattctgtacagattgccttcctgcctttggcggagctcctgtttctctgtgaatcattccttggtacacagtgttaccattgtgttatctgaaagagcgaatcctgctgggtggtggtgccgctactccattgggaaggtcacaagttcatgtctgctttgccttctgtctagtgaaatgtgttcccactaaggaatagagaattgcaatatttttctgcttatggaaggtcaggcgttcagtggtaccctagcagtgttggctaaaaggccatcaatagtggcaaattcaaggcaaggcttaatcttgcctgttgtctatcattccacatgtttttttacacctcttctcagtggctgaaaaatgaatttgcttaaggacttggttgaagtgactgaggatgaagcaggaggcccttaatgggaccctggagtgaaagcgcttgcagtttaactaagtggtctttattgattaagcaggcatttattgaacatcagctctatgccagacactgctttaggtgctggagttactgaggtaaatgaaacaccaaaggtctctgttgtttcagggcttttattctagtggaggtgtcaggcaatagcaatggcagagagtgagtgacagaagctgttaggagattaaagctgaggaaggtacgagaaagggcagggctgttgttttacatcaggtcattagggacagactttctgaggagaagacgtatgaacagaagagaaccatagaaagatctagagagagagctttccagaaagaggtaaaagcaaacagatcctgaagtgagtgtgagtcgccatgagacgggtgccacaaattcaacatttgtttgaaataagaatattttgttgataatgattatacacatctatataaaatacatttgaaaacacgacattatgcacaaaaaaccatcaccacttttaaaaatatgtgtatataatgaaggtataaaataatattttctgtcataaatttttccccagtagagccatcatagggttaaaacaatatgttttatacataatgtactgtaactgcttttttaacaactgaaaatgtacagaaaaatggtgttttgactgtctatctttagtcttcagctgttgctgtcacgattcagaaatttggatctctgccttaagaagcacattttcttagctataaaaaaatctgatggaatctacaactgtaatcataggctgtgactttagaatataaatcacttgttataaaaggggggtgttggtgtttcttttcttttcatttgattctcatttgtgttctcaatatgctttactttgagtttgttcgtatttggatgaagataaaattttccttggcttcagtgtgtggcaagcagtgcccatttattttaatagatactgtaccaactaaatcccaatatgtgtcaggaaattcagaaaactgaacccagaaatgatgctagacacagatagaaaggaggacttcaaaaattcctacatgttactttggtgattggtgtgaaggagtactttatagtatcttctaaaagtacagttactttcagaaaaatgagaaaaatttaaaaagattaaaaaacacagtatcattagaatttggtctcttgcctctaaattttctaaattaccaaaaataaaataaaagaaatttattggctatagataatatagcacaaattggataattttaaatctcagacatgtaaaatcagtacagatttcacaccaaaacactatttgtagcaatagtagccatgagaattaagtatctgacctgggaggccccaaaatatcaatctcaggtgtgtccgttagaaggtaaaaaatctggaaatagaatcctgagatgatatttctacctataatacttaaggtaaagaaaaggaggtacataagaaacgtttctagattttaacacaagagacaaataaattctttttgacatgaaagacaaataaattttgagttgcaaatgagtgaacatgccaaggtacgttaaactaatatactttcttccaaaactggcttaagattggtaaaagtgcattcaggcgaaattatttttaaaaattactcattaataaaattttgctaatttttgttgcttattcaaattgctttgtgttgtcctgaaatatgaaattatggagaaacaattctagtttcaggatacaacttaattggagttaataggtttttaatacagtgtgttgtatttatgtgtatataaatatggcgtattcatgtttccttttttttttttttgcaataaagtatagtggattaaagcctaagttttgaagtcagatgtttttgggttccaatacttaccaactggttgaccttgggtaattcatctaatgtttctgtaattcagtttctttatccgtaaagtgtagattatacagttcaaagggggtattataaggttaaatgtgataatgtgatgataatgtatataaaattaactagtacatagcaaactctcaataaataatggttattatctcttagttcccagtggttctctctttctctttctgccttccccccaagaaagggctggaactgattcttttctcatagcccttagaaagaactaactcagctgatgccttcatttttggacgtctagctcccagaactgtgagacaataaatttctgttgattaagccacccagactgtggtattaccaagaagtactaaggtagtgctgtaaaaatactttaaaatgtggaatttggaatttggttggcagagactggaagagatttgaagtgcttggtaggaaaggtctagattgcctccaggagactattgttagacttatgaatgttaaagatgtttctgatgaagtttcagacagaaataaggaacatcttcttggaaactggaggaacggtgatccttattataaaatagaaaagaacgtggcctacttgtgttctagtttctttgtgaaaaatagaacttataggtgatgaacttggatatttagctgaggagctttctaagcaaagggtcgcaaacacatcctggtttctccttactgtttatagtaaactgtgaagggacagactacattgaagaaggagttgttaagcaaaacgtaaccagagtgtgaagactggaaaaattctcagcctatctacattgcaagaaatgagaaaacgtgttctggagagagcatcaaaagtgtgactagacaatcatttgctacaaagagaagcatgtgactcattaatccaatcaaccatctcagcaaaagacaggaatagatatgtgatcatccaggaaacatctgtgaaagaccctcttgtctggtggtttggaaccctgtgaattgcacaggaggccaacaagatttttgagagttttctatcagcagaaacactacaaactctgactgaaggtgacagaactgggatgaagtgaaggaaaatggtcagacttctgggattctacaagcaggaaatgggttgattgaactatctggctggttgataatgcagatagtttttaagaaaagagaagaatgatccagaaggtagtttagaggccagcagagctgcttctgtcatcattggtccagagagcacaagcctggcaacactggggccatcgcctcattggttccagaaaaataggaccacctccttggtttcagagggcaggtctggccactaatgctcaggttctagaaaactggtgccaccccattcatgggcccaaaggacagaacactgagccaaagaggattattctcaagcctcaacatctaatggaatttttcgtgctaggttttggacttatgatctctttcttccttttggaataggaatgtttgtcctgtgcctgtcccaccattgtattttcaaatcagataactcattgtctggatttataggtttccagatggagaagaactttgccgcaggatgaatcatacttcaagtttcacccataatcgatttggatgatttaaatgagatttgaggctcagagttgatgctggaacaattaagacttttggaggtgttgtgatggggtgaatgtattttgcatatgacagacaacgacatgaatttttggggtcagaggatggacgtttatgggtttgtgtcctccccaaatcatatgttgaaattctaacccccagtacctcagaaagtgacctattttggagaaaagatctttacagagattataaagttaaaataaggtcattaaggtgggtcctaagccaacatgactggtatctttattaaaaacggtaattgcaacattgagacagcataaagggaaagccatgtgaagaggcatagggagaaggcagccatctataagccacggagaaaggcctgcaacatattcttccctcacaaccctcagaggagccgattctgctgacaccttgattttggaagtctagcttccagaacagtgagacaatacatttctgttatttaaaccacccactcatttgtactttgttatggaagccctaataacgtaatatatactattgtgtatgtcagaggttcagactgtattatcaaaaaggatctaatttatattgtataaggatagttgaacgagtatagttatttaggatggaagagaaaagtattaaagaaaatatctttgcagggctatatatgacccaggaatcctacatttgggtattttccatagaggaatgacagcttatattcacacaaaaacctgtacacggatgtttacagaagctctatttataattgagctcaaaactagaaacagcccaattgtccttcagtgggcaaataagtaaacaaactggtagagacttacaatggaatgctatttggcaataaaaattaatgaactattaataaatgtacatcttagctaaacttcaaggacattgtgctgaataaaaacttgatcttagcagtttaaacgctatatgattccatttatatgatatgattgaaaagacaaatcagtgatggagaacagatcacagattgccagggattagtggtggcaggaaggatgtgactataaaggtgtagcagagaaagttttctgagggtgacacaactattctatatcctgaacatattggtaattgcaagaatatctatgtgtgtcaactttcatagaaccctacaccaaaaaaggtgaattttatttcgtgataaattaaaaagtaaaacaaaagagacaaaaatagtaaccagggaagctttcaaaaaatatatgttcttgttcaagaccagcatggccaacatggcgaaatcccatctctaataaaaatagaaaaattagccaggcgtggtggtgggcgcatgtagtcccagctattcagacggctgaggcaggataattgcttaaacctgagaggtggaggttgcagtgagccgagatggtgccactgcacttccagcctgggtgacagagtgagattccatctcaaaaacaaacaaacaaacaaaatatatatatgttatctttaaaagtctttgctaaaactctcagcatgcttacatatcaaatgtctcaagcctttgattttacatatgtaatattgcagtgttttgattatatgaaatattatattgaagtaaatttgattaactctaaatttaattttaaatttaaatttaaattctaggactttatagcaagtcttgacaaataaaattctattttcttcgttatgaactaatgagccatcatcattaatgttactgaaatttttaaaaattctaatatgaacagatttaaaataaacagactatgtagtgaaaaacaaatcttgaaattaagtcagctgatcttgatctaacctaccattttggaagaattttctacattgatatgtattatgtacccttataaggctcatagtagtaaaatattaatttaggaaaatattgtctctgtgaaatagcttgtgaatgtccacttaaacacataatggatctctgcatattgttctttttttaagagcagtggagtggatttgatttaatattaatgtgtgctatactctatgatctctgtagtatcacagttaactggacttatataggcaattatttacatttaaaattttacagtgtagattaatactatgttatttttttcttatctatttcagacaagactactgacaaagtaggaaataataaaaagataaaagcttattttagagaaagaggttttcccaaatataactttgtttctaacagctatgtccttaatattttattcatttgaaatcacccttatagacaatttgctgacaggttaatattatctttgggaactggagtaccctcttttagtgtggtttttacaacatctaccatgggaacagcttccccttccatttaggtatctgactcatccttgctaatatatcttgatttaatgatgacctagggaagaaagagaggaactcccttagtatttttattctatgtaatctgccttctcagaatgtgccttgtgaaagaagcacctaattactctgctaaaaccagaaagcactgtgaggagaaagcctggcaagtttctcctaccagtctgccacctaatgaatagaaattgcaacacactggtattctgcttttgcactgcggcaggaatgtgaataataataattattattattaaaagaacaaagaaatgttagctaaaatggtaaacatagataaactgctgtgatttaagaagtttccatttggaatcctctgtaagctcaagtataaaaaggatattggctgtaatcactttcaagacagtaacaaaaatgcagggctaatagcagggcatgatttgacgtgccaaatttatttttctttcatatatttaactgctaaatattaatcaatcagaatacacaatgtcagcctctgaagatacaaaggtgaatacgatagtttatgtccttggagagctcatagattaggccaggagacaaatgaaaaaaagtaccataacatatcacaaaacattctgagggagacagccaatgctggtggagtacagatggatgaaacagctgactcttcttatggaagttgagaaaaaatttactgaagagttttcctttgaatttagccttaatggatgagacatgacatgcttgacaaagatgatagagaaataacacttcagacagtgaaaactgcacaaaataataaatatacaacattttgaaaatgctactgcttaatgccaatatagctcttactctaatttgagagaaatagcttattccattttgtttgatccctcctcctttgtcttattctgcaccaaggcgatcagttatttattcattcaatgaatatttgtttaaatacctactatgtagcaaacagtatttggggagctgagattacaggatcgaacaaacaaagctctgttccttatgaaagttaaatttcaggaggagtaaacagatgataacaaagtcgttaagtaatatcgactatgataaacaagtaattaatattatacgctgacaagtactatggagaaaaatgaatcagaataggggaggtcggtaggtttaaacagggtgattatgggggacttcatgaagcaagcgatatttgggcagatgctgaaggagatgagggaacaaaccatgcagatatactgggaaaaaggaaacttgaacaacattttctgtgaacaaaaaggaggccagtgtggctgaagaagaactagggggagagttgaagaagacgaaataagagaagtactgcagttggagatggggaaacctcatgtagggacctcaaggccactgtgtagactttgcttttactctaggtgatgaggtgtcattggagggctttgagtaagcaattctttcttgaatgggaccatctctaagaaacatgaaaccatgctcaagcatctaggatacaagcctcccacctaggattcaggtgactctatcaggtagtatgggctaaaactgatctttctgaagcaccattttcctaaagatgagtaattaaatagcatcatatggataaaagtgaggtattcacatcatcttataaagatatcatgctagataacttcagactcaaggatgttaagtatatgtgaagatgaacttctagcaatatgactggatcaccgtgggagcatgaattccgtcttctgtcccataaggtatcctctgttataaaaagcttggatagcattggtgaagtataataaaatggacactatagttagagtggaaagacctggttttgagtattggatcaactgcttaaaagctatgcaattttattttttgatttatttatttttttttgagatggagtctcactgttgtctgcctgggctggagtgcaatggcacaatctctgctcaccacaacctccacttcctgggttccagtaattctcctgcctcagcctcccaagtagctgggattacaggcatgcgctgccacgcccagctaatttttgtattttttagtagaggcggggtttcaccatgttggccaggctagtcctgaaccccccacatcaggtgatccgcccgcattggcctcccaaagtgctggaattacaggtgtgagcaactgtacccggacttgcgtcttgatattcttatctgaaaatgggtataataatttacaaataatgtacatttggtctacaaatatttattgactgtctactctgtgccatagtctatcccaaattccagaaatacagtattgaacaagactcagcccagcccaaaaggattttatatttcaaacagggaatttcaacagtatttgtctgatatatttatgaggatcaaataaagtaatatattagaaatgcttactgccatatatggcactcagtaggaatgcaaaaaatgtaagttacatctctataattcttttaaagagttgccagttaattttctaagagagctagataaccatttttattcagttgaatattatcttcttttcaatcatgttagaataattctctagcttcgttttttaaaacaaaatataaaaattgggagaagttgcaatttgggggttgctgtagttatatataacagtatatttactgttatatactgttgtataacagcatacactgctggaagaggtatgttagttcattggtgctctgttaccttgtctttgactgaaggaagggatcttgtatagctttacttgaatagagtctaatggttgtgtgttgttttagaaaaaaggaaccagctagtgaaataaataaagacatgatcaataataattcaattttattaatattgatagtcttaaatctgttcctcttttaaagatttttttttaaaagcttctggattgtctttttaaaaaaagcttcttaattcattgtcttctcaaatatccagctttgtatttacaataagtgggaaccatgttattttgagtgccatgttgtgctaggtataatattattgtatacaaactgcagttttgtccatttaaaatacttttgttttataatagttgaaaagtagttactcgtagaaaatttattccaggtcaacttttaaagtttgaaggatattgaatataaaaagtatgtaattattttcatccaaaataattgtattacaaagatgttgaattttaaaaacattttaaaccaaagttatcatagtgtcactataaatttataatatttttggctgtaattaattgacctttcttttcaattcaatgaaaatcaaaatgtttccatttttccacaatatttataataagtaatgcattatttaattgttattgactatataactattcaaatcctttaatgatattttattatgataaattattgattcttattgctttgacaggatgtgaatatcagaaatttcattatttaaaactgagacaggctgggcacggtggcttgcacctgtaatctcagtactttgggaggctgaggcaggcagattacatgaggccaggagtttgagaccagcctggccaacatcgtgaaacctgtctctactaagaatacaaaaaattagccaggcatggtggtgggcgcctgtaatctcagctactcaggaggtaggatcgcttgaacccggaggcagaggttgcagtgagcctagacagagccactgcactccagcctgggtgacacagcgagacactgtctaaaaaataaaataaaataaaatgtaattgagttataaaaaataaataaacctgagacatacctttaattggatttctcaaataattctcaagtatctgtacattgataaattaattgggaattactcatttctccttctgaggtgccaagggctaagggttatacatgaaccggaaggttttcattttattcattagttccttcctaggcacctgacagggcaaatagattctatttgccttttctcctgttctcctggctgtctctctcaaatagtatactttgctgaaatatagcataggatttatttttactgtgcttatgtttactttttcttagatagcattggctatttcctatcttgtaggctcatctttgatttcaatatttggcaaagtgtctcatttttttttttttggcagtttggctctaaaaacaaactttcctcctcttgccttaaacattttttttttcagaaataagtaattcagactttcaaagagtccgattatcttttaaattttatatttcaattggctgtctttggtattcctatcttttttctagagtaggtagaattaacagactttacatatttttgtgaacatcacatcttagaatgattctcaaaatttctttacttgggaacttggctgtcatagtagggaaagtgaaaaaagtaatgtggaatcccacgtgatggcacataatttggcaataataattggaaagtaattataattgcactattgtactgctttaggtaagtttatgtcaacatttctttatctaaactccagttcacatatagctatatctgggttgtgaaatttgctgtaatatttttagaaagaaattcctaaaatgcttactatattttggcagttttgaaaagtaaatatgagaagtatcttttgtaacttcaaattgctggggttttttttgccaatacatcactatgaataatggcaaaatcacatattttcatgtcccagttttaaatcatattattgctggaggaaagtcccagctttgttttcataattcagcaaataataggtagcttatagccatattttctcctgtgacattactaatagtttgtcttctcaaatagggcagttaaaatatctttagatattaaaacatgcattagagcctacttgaacaaaattacaattttgtaattgaattaaagatcattccattgggaatcaaaaaacctgggttttagttttagctctaacatcagcagctaatatgattttaggtaagttgcttaaattctctagctctgttaccttgtctttggaatgagaagctgaacaaggtgattactaggattcagtgcaaatctaaaattctataactgtgcttttgttcataatatattttagttaattattgaaatgttctgctttccagagtagtaccgtaaaccagtaatttaaacccttcctactatgtttcaaccactttcccaagggctggtatgggtcttacttgctcctacatgtaggagttagtctgctcttatttagtcctttagatatttagcacattttagcctgaatatctgacacagatgaatgatttttttttttttttgagacaaaggcacactgtcaccaaggctggagtgcagtggcgtgatcttggctcactgcaacctccacctgcttggttcaagtgattctcgtgcctcatcctcctgagtagctgggattacaggtgtgtgccgtcaagcctgggtaatttttgtatttttttaaggagagacgaggtttccccatgttggccagactggtctcaaactcctggcctcaactgatccgcctgcctcggcctcccaaagtgttgggattacaggcatgagccaccacgctcagcccaaatgattttataagcgtagaagacatctctcacatcttagtgggagaattaaatgtctctctttttcactgaagtcttaccgagaatcatttcttttctgtcactcttgctgatcttgctgatgagccctagttctgctttgtcaaacttatttgagatcaggctggcccttgtgacaatcattgccggtatagacttttcataacatccagaaacttcaagcaccactatattgtttctacttcctcatatgccttttaaagtatagaagctgtattccaatatatatctacatgttaggttacagtgatctgcttttggacttgaggcattttttggactcgcctgtccgtaagtctcacttgcattctttgtgaacaaagaatacacccactctcaaatgtatatgcccacacacaagcatacagtatcttgtacacctatctgcacacacacaaacacatgcatagtgcttgactttggactctgtgctttaactgagagtattcatttttcctggttgttaccttcattccagttttgtgagctttgctgtcaaagtggctgtgcatctagcatagagtggctgctgttggcaacccatgaacaatgagcttaaacagaagaatgagggtaatgtttattgtaataaagattgggcattaaattccttgggggaatgaaccaaatccaatgttttcctgttcgctgacattttttatattgatgctgttttggatcttctggagaagggaggaaaaaaaaacttcagcaaatcagctctttcattcaaaaatggaattcagaaggctattttagctagctttttttgacaatcctggatttaatcagtttttactgtgatgaagacagttagcctcacaaattttgtggaaatctaaagcgatgaagggtgttgttaagggggaaacagagtgcaattgtttaaataatcctgggccaatagcatttggtaggtggagttactgttgtgtgcattacagagcaagataattctgaatgaagactttaaacattacacatgctggacggattctgggtctgctctttgtgcaaacaaaacaagtgactaggttttgcttactatccattagtgaatgcagcttgtttaataagattttttttaaaaaaatgcatgtaaaggatttatcaaaagcctttatgaatatttcatgagttgatatattcagctgaatgaattcagtgagtgtcagtgtgtagcttgcagacaaacctcatccacaaggaggctactgacattggaagcactttggcgcattttcagaggcaaagccagcctgataaagctccttgtgacagcctgacttgctattcttcgagtatgctgctcttgctctaagacgctcatacattggagtcacagcttcgtaaattaaactggaaatagtttgcagacttatcagtcttctgacctgcagcagtgtctctgctatgtttgagatttttgttttggatggtgaaagctagcactccttacaagacatgacagcaaaagattcttcaaaggaacttactgcttctgaacctgaggtttgcataaagactttcaaggagcaaatgcatttagaacttgagcttccgagattaccaggaaacagacctacatctcctaaaatttctccacgcagttcaccaaggaactcaccatgctttttcagaaagttgctggtgaataaaagcattcggcagcgtcgtcgcttcactgtggctcatacatggtaagataagacttggaggtatctacagtgcttttcagattctcgcattagcaccagtgatctagcagtgtagaaaatggaacatttgagttttgttcctaaaacatactgcaagtgtgaaatgaatggagaccaggtcagatgaagagtacataaatgcactgtgtgctaaattgtcattgtgctactagctttttccagataaaatatgcttttaactgtagagtctttaaaattactgcttatcagaatacatagctaattctaggtaagtcgagtaataaatgaatttttaaagtcagttttttgtttcatatctgttgaggtggtaggtgacttttttgttttgtgattgttagtgattttaaaaaaataattttgggacatgaataagtgttttaatcttagttctaacttatttttaagataatgtataaagtctaacttaatgtattgtaccatcatgtttatagcatataaaccagtgagtttttgatttattgacttatctttacaatacttaaggaaagggaaaactaagttcccacttctgaaattgcatggtcagttactttaatttttgattccaaaatgctgttatctttaagagcttctttttttaaaaaaatggactttaaaatttatagctattttttaaatacccagcaaataaattcaagaaccctctgtaaaacttgcactgagcctgccacctttaatatacatgtttacaaggtatgtaaatatagtagggtaacgtccttaaacagtataatgatgaaatgtaaggaaaaaacacgatgaaattaaatcacttttactgtgaaagccaggccacttcagatttttttggaggctatattttctttcagattaaggtacctttaaaaattgagtagctgtaccttagttttttctagcagggaccatagcaatatagggagcatgtacattttaaaggcaattctaacacagtgattttgtgactacatgctgggttgccaatcaacattataaattgaggagatctgatttttaaaaattaatattcacttgaattattttctacttatctaaaatgtttgtctgcttaatctactgtatagtgcattggcaaattaaagttacgcctagaaatatatagcttgcctttgatagataccacatgcttagccaacacatactttgcctggcatatatgatgtgcttattcttgctttctgacaatggactgttcatataatggctttattgcagattttctttggtcatcttcttgatgtattacatcatgttgtttaattgtaatctcttatttgcagaatacacgtggttagtctttcaaagcctactaatgatggtaacattgtataaagggaaggtttatgtataaggatgtactgacttgaagaagtcctctcttttgtgctttatcccacccctaacatgtatgtattttcttatagtttgctgagtagtataactgaatagggaagatattagttatgaaaataatatatacagaaaatacacaattaatagatgcacattttttcttgagttaatattaaattgctattttaaccaaaaggatatttaattttagatagctaatttttagataatgataagtcttcttaaacccttggtaatatttttctttatgtagagttttggttctgaacacaatagtgtgacctttctttttcttataatagatttttgatgtgctaagaacatagagctataaatactggagttttttacttttccaaagaaccccaattttaaaatgattaaagagctagttttactcatgcattatacaaattttctggcagcaaaaggaacaattaaatggtatctgaagttacctacgctaataagatgatattcttttagttgagttaaaacaaaatgttacaattgccaaaaaaaataggactttgatataatgctctataatatagattaaaataattcattaatcattaaacttgtgaaataactttagttttgactatgattcattttcacccttttttctttcaactcacacattccccttctgatgtttcttagtaaaacagtttcacagtttgttttcagctcatgactaagtctttatttatatttatttctattgttttatctgaatacatgcttaacatttttcaaatttattttcatacaacatgcaatgaaaatctctttctagaaaatagacatgtatcttacatatttttatgactttttcaaatcttaaaaattttgcctttcccggggaaccccgataaagtctctagcctaatgcttcatgctttccccttgcttcgcctttttgtctcttgagcaccctaacgtctttccaatgaatatagatggctctgtatggtctgctctacctcctgtctctaagactcgtgagaataataaacttttctttcttgagtttccaaaaaatttcatgtgcttttttacatagatgaaatggttatatgaggaaataagagcataagtactttatttttgcctctttgtcatagtgaaatgtaaccagcctttcacgatcaacaattggtatttttccaaaccatgcacttaagttagaaattccaagatatgcacttagaagtctctaaaaacatgttattactttacagtagacagtaggcttcttttaagaagattggattgttttgattccagcattgaaattaaagtaattttcatgatgaagctaaacaatgcagaggatgcagtttatatgcaaacccactaaacagtttttatttgtagatttcatatttcagtcagatggatgtgtagttctggctttaaaaacccaaattatgaactgtggactaatggcagaagatttaagaaatatttatgaaattctgactctgggctatttaaaaatatctgggggaaatgtggatattcaatgtgttatcactaatcagagtatttacaaaatcctaaatctggaaggaatttggatgattatctcattgcttccttttacccttgggcaggaccacaattactccatctttaacatatgggaatctgccctacttttaagactctagagaaaataattctaaaatctcacttagtatacaatcttactactttatagtccaggtactagaaaattatttgttatgatttatctatattatttatatattatatataatcttttttcccctcagtggatattattaataaaaaagatgcgtaagagcctgcatgaatctgaagatcattattaactggtgccagcgttttctttttcattcactcaacatatgtaattgagcactgctgtgagcaagaagagaaaaaaaatctgattcaacccacatgtattccaacacctactatattttaagttttttactagaatgtctgcatatgttatcccatttaagtttcatttggaatataagtatactccaaattcatgatcctttcaatattacctgctgcagatatcaaaagtattttgaattgctctagcttcttataggtgtttatactccattcatcattattttgactctgaatcactatctcaaatttcaaaatttttctttgaattttgaaacccaaaagtggataccatactctttgttagacgatatgagaaaatatagatatgaaacatgtaataagttgcaaagtgtcaatggaaccttcagaattactgaattggaaaattactgccagagttctcaggtcagcatagtatttatccccaatcccacatcagggatgacaacttatgaagcacagtgttatcctacttggcctgtatggcctgcctgtgcttgcctggtacttgtcacacagtgtccagcttttataaccttcccttctttgttgatatcccaacttcagtcgtcagttctctttcatcattagcaacttgatgctctctgaagaaagctactgcaatggtcttgaatatatcctgggcccactgcacccccctgacccacccccgccccccaccctgctgcattgctgctcctttttggagctctcttcttgtatttgtgaggactaccctctatctctctgtccatgcttgcacacaggaaacaatatttttgtaattagaagttagtaggagaaaagaggcttgtattccttcttctcgtttagttttacctgtatcttggaaatcttttctcgttttaacaaaggtttatgaagtctttacttgtctatctaatatttgaatacaaaagttttaaaagccatagttagtactctaaagggacttatatttggcaagacaacactggattaagtggagaataggaaaaaaaacagtgaatatggcatatgattgaccttagaactgccgacatgcttgctgtattatacaacttagtcctagtttgttagctaactctactgaatctgtgctagtaatattgatcaattgccttgaattctatcctggtaatattggaaattttttgagagatgtctgtctttacatgtttattgattcaacatttgtttgaacaaaacagttgttaagagcctactatgcaccaggctctgatctgggcttaggagacacaaaatgagaaaaagcccttgtcttcaaagaactcctatactagctggaagacaaacttatgcaataataattaaccaatggtgtgggaataatgctactgaagcatgttgttcaacttgtcatgagggcacagaagaaataactaccactagagagtgagtcaatgtgttaagggaagtttcgagaagagatgacatttgtgtggggttgtgacaaatgaataggagttttctaggagaaaagtgggcaggaaaggtattttttggccaagggagcaataattaggaaatcctgttaacaaataataacaataatagctctaatatattcagcacttatataatgtgttggatattaattataaatgtatttactcatttaagcatataaaaccccctgagttatatactattatattattttcattttataggaaaaggaataaaggtcagacaggacaagtaatttgttcaagtttacacagaaaataaacagctgagttgggatttgactctgagcacgagtgaaaatacacatagttcactggggtttcagcctaaggatgcaaggtgggaaagctaggaagtaagactgtgccagcagattggagccatttgctagggcttccaatatcatgaacaagagttggagttttagcccatccattctcggtgaggagccacgacaggttatgagaaggggattgccatgtattatttttattttggaaaggtactttgcaggtcaggtagagaatggattagaggacaaggagcttaaaggtaactggaaaagggacaatgtgcatttgagagataatgacttctacttattttgtatatcccgtaacattgaaaactatgcatatgacatgttttatgacttaacaaattatggtttatggaaactgggaggaaagcatgtgaacttggtgtctcttgcatttatcacttacaccatgatgctgtagatagtactagctggtacaatacccccacatgcatcaaacaatcagcaaaggtgcataggaggatgtgtgtatctgaggaaaaccctattagctcagtcctaatttactagaggtgctttgtattttactttaagtgcagactcctagtgggttaaaaaaaaaaaaaaagcagatattatcttagtccacaatctgaatcaaatggcagtagaaatctatgcctcatagcctgagtctgttgctttaatcagagcaagcattttatcagtacatctataaatagtgttttcctggccttttagtgtcatcaagtcttcaatatattggatttttaaaatacttacagtaaaaagggctttgcaaagtaatggtgacaacccccaggacacatgccggaaggtggcccagcaagcttgccagctgcctttctgctaaaggctaaacccattttgctaaatcccacttgcgttctctttccattcctttctgttttgttatctctcagtttttctccttggatgtttatagtgcttccttctctaacatcactgtcaatgcacttgcaacattatgctagaagcatttaagcgatttcttagaaaaaaatctcaaacgcttaccatggttttcaggccctacattatctggccccaggctgcttccaacctcctctcctgttctccagccctgtgagcctgctttctgttgttcagcaaactaagcctgtattcacttctggcctttgcacttggttttcttctgcctggaagaaaagtacctggatgttaacacggtttctccttatgtccattcaggattctactatctccaggtatcactatccggagaggcctttgctgacctccctatctaaaatagcaccctttcgccttttacttccttgtctttttggtacttattattacctgaaaatacattatagacatgcttatttgttatattgtcttatcctttcatcatctgccatccctgctaaatttcatgagggcagtgattctgtcttgttttcagtatcctcagagcatacaagaaaggcagtcatttaacaaatacttgttgaagaaataaagaatgaatatggtttctgtttcctgctctttattctatgagcatttttcctatagcttgatatgatggaaatggaaaggaagctttgttgatacttactctataagcattcttctccaatcatctctcaatagctgtgctctctttctgtcagtagagctactgcagcttgcttcctatattgtattctatgatattgcaggtatagatttaattataatatctcactagagcctaaatgctttacatagtagcctatttaattaagtcaccatgtacaaatcatacctcctagtctgtagtgctgtaaagtaaatatttgtctgtagcactgtacaattatttatttggtttttcttcattcatcaagtagcatggttggtgcatcagctcaggaaagctctacatatctctcaccaaatgcctgaggagaagtgttgtatgggggaatctacttgttattttgccttcaaaatatttacatagtgtacattagaatgcttaattatctatatttttccactgatgcaacatttacaatattaactctagcagcagctacagcaatttgagcttttaataggatttccccagggaacttggaagtaagaagtctatgacttgcagagtgaggaaattgcaagttaataacccttgtactctagaaaagacgtcactgagagggaaactgttcacttggttctgcctcattttttctttcctgaactaggaggttggggacctctgtcactggtagtaatttgtttgacataaatatgtttgaataccactgtgtactttaggttgaaatgaaaaataactcaacttctcaggttgcttcttcctggaacttagggagaatgaggatgactgcttctcaaaacctttgtaaagagaatgcctatgagatgatgtgctcccttgacagaccaaggcttgtcctcctcttccaaactatacctctcaaaactcagctttattgcaaactatgcagattggaagtcaggggatggaggatagtgtagcttcaaagagtgcttctttcaaactgtattttctggaaaatcagtgatctaggagccatttggagattcctcgaaaaagagggtggtgatgatctgtttcctggttctcggtcagaacaaagcaacatggatgattatatgcttggagaattttggaggattctcacacaaattctataatctccaagtacttgaaaaccaccagtttaagagttaaatgagtagagggagaaaagaaatctgtttagttgtgcttgataaagtcacagacatttccagataatttataatattaaaatcatcttcatctaatatgtccaggaatggcagcaggataaatgaggaggatgaaagcaactgtgggtcagggagacatcactggtagtgaacatttaaaatttcaaagttgaaagaatagtacaatgaacaccttttacctagatatactaattgttagtggtttctcttatttacctctttgtctctttctgtgtataaaatcatatatatgttttctttatgttgaagagagcacatttcgatggagagcaatagttttgggatcaaaagaaaaatattatttattttaaaacagtttccatgtatcaagcttgctgttattacaattcatccgtgtttttgcatttattagtaatttattcccttttattattaggtggtattcctttgtattgggtgtactacaacttgtttatctgttcaccaactggatcaaaatttggatttccagtcttttggctattatgaataaaggtgatataaacattcatgtatggttttctgggtaaacatatattctaatctttcttgggtaaatatcttagagtggcattgatgggttgtattgtgaagtatatgcttttttggttgttatttgtttttatttttttgacatggaatcttgctctgtcacccaggctggagtgcagtggcatgatcttggcttactgcaacctctgcctcatgggttcaaactagtcttgtgcctcagcctcctgagtagctgggactacaggcacgtgccaccacacccagctcatttttgtattttttgtagagataggttttcaccatgttgcccaggctggtctagacctcctgggctcaagcaatctgcctgcctcaacctcccaaaatgctgtgattacaggcatgagccaccgtgcctggcctatagtatatgctttactttataaaacactgccaaactgttttccatcatggatgtcccactttatagtcttactagctatatatgagagttcttattattctgtatgtgtgagggcattttgtattgtcaagttttttttaaattttcgtcattctaacagataagtagtggtaacttactgtgattttaatttgtgtttcccttatgactagtaataccgaacatcttttaatgtctttatttgctatccttatctctttggtaaaataaaattgtttatataagtcatgtatcaataaactttgcaaatattttaatttttaagagcacactgacatattggcaagttatgaatacatttgtagcaccggtttaaaaaagaaaactattaaaatatagtagagggctaaaggcatctatcataacatgatttttcttgctgataaattattggttttcatttcttaaaatggtttctaagagatgatgtctataagattcaaattttcttcctcaagaaggaagtttttttaaaaaaataaatctataataattttataatatatatgaaacactatataatgccttaatgtagtatactgtagaacttggggttctatcactgtataattttgacgttgtctggaatttatttttcatggtgaatctttgttttatgtgacttcatctggagttgagaatgctaggttgggtatcagtattttaccttgatttgctcttgaaactttagatcaatcctagaactaatttaattgtcctagacctcaattctttaactggcaaaatggagaaaagagttttatattcagatatttgcaaatgttaatttaatttaaaaaatatctacctagactgtgagttacctatttcttgagataatgtattaaagtacttagaacagtacttcaagcattataagttgtttaatagatgttactgtttaattatctgactaaatctctaaacatacacaaacattcatattattgtcagggttggttggtaaagcaggaactagtttttttttattttttgaaaagcatcagtatgtatggactgtgccaatttggaagagtcaaagtgcatgtgggttagtaaagaagtacatttataatatccacagtgtgacaattcagtatactaagaaacaaagtatcattcatttgctgtcatgtaataatcatatcctaatgaaccaagctaaattatactaaaatgcactaattatcagaagacccagtgtgaatagcttacattcccgataagaaattttattgtcttgttttgctctcatcaatacatttaaaaaaaaaaaacatttatcatcttcactctgtgaaagagataggaagagaaccactttgaagtcattccatccacttgtaccaataagcttaaaagtaacaagacaaagcaaaacataagaagatgccttgtctatttcaggatccgcatattaaaagccaatataggattcagtgaacaaatgccttggaagaattccagtgtcatcaaacttatttatctcaaaacgtctccttccatcctttctgatcctctacaaaattaataagctgagactatttgttgcagcacagaggatctgagcatgcttctgtggcttatttctgctgtaattccctcagcagtttatacaggaattctttatctcaccatcaggattctttaggccagaagagaggtcagagaagactggacaaataaactatgggatctaagtctttcttgctaaggtcctaactgcccaagacttcctcctgagagtctactgttgaaattcatatgcaaatttcagtttcatgggattaaccctggctgttgtctttacctgtcagcctgctcagccaggtgtgagttcacccataaaacagtgtctttcacatgctcatttatcaaaacgacatagagactttaggatgccaggtgatatgatgcaaaaagcacaacatttggtttctaactgcatcttttaccatacactgtttttgggcaaaccattcaacctatcttagaaaaagtagaaaaattagaaaaattagaaaaactctacttgtatttcattaggcctttatgaagattaaatgaagtaatgtgtgtatgatggttagtataatccctggccaatggcaggtaataaaagcagtccttagttcactaatgtatcgagagcttatgattttgtgtaaaatttatataatatgtatcataatgtaaactacttaaagatctttataacatggtttaattaaatcagtttcattgagcaaatgtggtgcatcttaaatccattcttttagaccacttagatattacttagtttcataggatatgactttatcataaagcacatattaattatccttaccacaataaaataaaaagtaataaatccttatgtgttatggtgtgtaatcactctcattcatcacagagaccattccaaattgcagattttgaccatagaataatcttttttctttaaaattccagttaccttcttgaatttgatactttctccattagtgaaactattaatagataccaatgaagcactgttttttttaagttaacgtaaaaaacatttaatggtcttttcaaagtgccagaacatctctgaagttgttttccttagtgggatctaacctcctagtgacttgtttatatcagaaagtttattcatgagaggcagtggaaaagcacctagggatctagattgacagaatctagacatgtttcctggcaccaccacttacaaactgtttatttatttgtttatttatttatttattttttgagtggagaaggagtagttctttaacctttgggagcatcaacttcctcatcagtaaataagagataaaacaatatcactgatttctctacttatatgattttatatgattatataacatttacaaatattaattagtatggttgagaagcatgggaaaagaaagataaagattactttacagaaagtaagggtactccatcattaaaatataaaaatcaaagagcttgacttaagtgccgcaggtgtatttcggtatatgtaaagagcatcccattaataaatattatcaaataccatacacattgctccagatttattttataaaagggggaagagtttctgctttatgggaccatgtaagtgagagactggagacaggagacagactaagtggtaccttaagatctcatctaccccacgggtctttatatcacttttagcttcctgcagaaagataataacaagctcatataaccaatatataatgaagtgaaagttgcctttattcagacaactttacagcatttaaatcaaattgctctttatttcttggtcatttcaaagaatatttaaggatgaaaacaaaaataaaggttattgcttctgctttgagaaagttttccttctcacataatctttgatcaggctattgtgtcacttggcaacttaaaggcaggaaaaagttatatctttaagtccagggattctatttaaatgaattgccattgaaaagtggttattcaaatcaactcacagcttagtaacattgaaaaataaagtaaactacttttgggtttcacaaggatcatgccaagtttctgggtctgtctaaattaataaaaataagacttaggaacctgtatggaaattgtagattaaattaagcaactgcttcatctgaataaagctttgcagagtctaatattatgaaggagctatcttcatgaatacagtgcttgcttgggattcaagggatttgagttttaatgccagctgaatccctaatgcccacggagcacatatgcattcatttgatgctggtagcttttctgtcaagtgggattaataattacctgctctaccacccttaccttatgtattatagtatgaatattcaataccagtgttcacggaatgctctgcctttctgcaaaataacatggcagaagcatttagaaaggaaaaaaagtttctaaaaaagttttatgcgtatcagattttcaaaaatgtgtctcagctttaaaatacattaatgaattttgtattttatatgaaccctaaaaatgctcttgccaagtacttagttatctgaaagctaagataattgttttgggtttcttacagctttgctgcatttgtgtatgttagtcctttgtcaatggataaacaccagattgacatcgcttagtgagttaactctgatgggtggctagtattttcgttttttattgattacaaccaacagatatttattgctggataatgcaaacatgaggcaccatgccatcaaggagctttaatctgggtaaggagagtatatagtcatttggcatgtcaaatgattaatttttcacagatacaagtgttaagagtatatcagtatagccaggcatggtggtttgcacctgtaattccaaccacttgggaggctgaggcgagaaaattgcttgaggccagaagtttgagacaagcctgggcaacatggtgagtgatatggtttggctgtatctccacccaaatctcatcttgaattatagttcccttaatcttcatgtgtcatgggagggacctggtgggaggtaattgaatcatggaggaggttcccccatgctgttctcatgatagtgggtgagttctcaacagatctgatgactttatgaggggcttttccctgctctgctctgcacttttccttcctgcaatcatgtgaagaaggacgtgtttgcttcctcttctgccatgattgtaagtttcccgaggcctcctcagctatgcgaaattgtgagtcaattaaacctctttcctttataaattacccagtctcaggtatttcctaacagcagtgtgagaatagactaatacagtgagactcccatctctacaaaaattaaaaaaataataaattagccaggcatagtggcaagtgcttgtagtgcaagctactcttgaggctgaggtgggaagatccttgagcccagcaattccaggctttagtgagccctgattgcatcactgcactctagcttgggcaacagagtgaaactttgactctgaaaaaaatatataaaagtataaaatacagggccaggcatggtggctcatgcctgtaatcccagcactttgggaggttgaggcagggggatcatttgaggtcaggcattcaagactagcctgaccaacatggtgaaaccccatctctaataaaatgcaaaaattagccaggtgtggtggcaggcacctgtaatttcagctacttgggaggctgaggtgggagaattgcttgaactctggaggtggagtttgcagtgagccgagatcatgccactgcacttcagcctgggtgacagaacaagaaaaacgaacaaaacaaccccccccaaccaaaaccaaacaaatgaaaaacaagtataaaatacaatgctctcccactgctaccaggtggaaatgatctaattatgaaactacaggtttgaagagcaatggttccacttctttttccaaatggctgtgagccttgagtctgcccctgttatggtgacatactgagcaattaatcagtagtgagctatacttgagaatctggtgtactagcaataggctaggtagtctgctgatgtgagcaggtaggaaatatctcctaagacagagggaaacaaattcgcattttaatttttttcacataaaaattaggcaatgatagaacaattacatcatatatttcttatatcatttagtcttcatctccatttgcagatgagaaagttgagactcaggaaggtcgattaattgataccaggtaaacaagctacaaagaaataaaccaagatttagtacatgtgttctgatttggagtaacacattttatatgctgacaaggtccatagatacagaggtatatcattacacaacccgccccatcccctttgcaacttccaactcccagctcctgtgggaaaatatccagggttactggattcacatgttcccttattaaaagcttcctcccaggaaggcttgtaaaattcatttgctcttacacataatggactcatggggtttaatttggggagaataaaccattaaactagaagaattaatttctacttacagaatttggcacattagagagaagagacaaaggggagtattttggaggatgaaaggttatgttccaggcatggaacatagacgatgggctgaatgtccaggcatgtcattgtatttgcaaaccattcattcactcattcattcattcattagcattgtcaaccacctgcttgattgtgcccatttcctgcctttcctgtttctatagatgaattatctgtgtacctggttaaggccaccccttactgtgcactgcattatatcagtactcacccacaagggctttgctcttgcacttgtccccgctgtctcctgtatcatcagttttccattctattaaatggtatccatttataaacatgctatttccctttaaaaagccctctttgacccgaggcactcctctatctattgctgtatttcatttctcccttataagcaaaactctcccaaataattgtactgctctactggtttcctctcctccagtcatcttctggaaacttctaaccaagttttctcctcacaattccactaaaagtgttcttcctgagattatgacattccatgtgccaaatataatgaccaattccttcacttggcctccagaacactgaatgtctttccttcctcatgggcttctctttctcggttggttcctcctcatgttcctcaagtctaaatattggaatgctccagagggttgtggacctcttcatttttgtcctataataactccctaggccaagtatctcaatctaaataacatccgtatgctgatgcttcccaaatttatatctctagccagacttttcctctgaactctagatctatgtctctctccagcagccttcttgacagccaaaacttagcacatccaaaatggacatcatggctttctcccccctacaccatgcccttgatgtaacatgttccaaatcttttccattgcagtaaaatgcaattcaatttttctaattactcaggtcagaaatcttggagtcttgcatgattcctgtttttctctgatatttcccatttcaaatgcatcagcaaatcctatcagctcaacattcacaaggaagcgagactgtcaccacttctcatcaccagctgtcgctgttctgatccaagtaaccattacctcaaacctggattatcaaattaacatcttactggatctcccttctttcattctttcccctttacaattaattcctcttgtagctgccacagtgatcctttatattatctgatcagttgtttcattcctctattcagaatcctttaacaacatcctatttcactcagagtatgggtcaatgtgcatgtaccatgcctacaaatctaccctggtctctacctattacttctccaactcctttccttcccctcacaccatcccagccacactgctgcacttggttctcaggctaagcaggatttcttatcaagacctcggccttttcttgttgtcaagaaaaaactttctccagatatctgtatgggcttttcttttcttatttcaggtggtgtcttgaattcatctaattggagaagactttttggccatctataaaaaatagcagtgcacatctttgcctttctaccatcattatccctgatttgggttctttatagcacctgatgtatatatctacatatatatgtatttttctatatctacatctatttcatatccatatgatctgtatctttatctatctatctatctatctatctatctatctatctatctatctatcatctatctatctaatctttggtattgtctgtctcttttctctctccaattagaatataatctccatgaagacaaagaactttgtctattttattcatttctaaatcctcaaaactagaacacatggtagcacatggtaggtagttaatacatatttattgaatgaataagtgaataaatagacaaatgagttgcagactgtttgggtaccttccagttttaagcactgaggccccatgttgaatgggagagggaaatgtgaacagataatttaaaatattatgtgataaataaaatagtaaaaataactattgcctttcaaagtaattttatctggaaatataaattttaaaatttaaaaaatattatataaaatttaataagagattattttctttataaagagaaagaggggcatttggcaagtatactaaacttaatagcaagaaaacttaaattcatattgtgattacattgtttactagctgtagaatcttaggaaaataactcatctagtctcttcctcccattgtacctagtatactatctaatttattttatagttgtgaagatttagtcagataatatcatacataatgggcattaagtagatattatttttatttctttccatatctaatactatactttacattcataggttaaccttctgtgatctgtcttattcctctgcaatttttcaatgactttctaaattcccacttcattgactttcttccattttcttcctgtgagactttttgacatcatgtgatgccatactcagcctcatcatccccacgaagattaatcatctttctctccttgcttcaacaatattgcatgtgatatttagctctatttctatggatggaagcaaggagagaaagatgattaatcttcgtggggatgatgaggctgagtatggcatcacatgatgtcaaaaagtctcacaggaagaaaatggaagaaagtcaaggaagtgggaattttgaaagtcattgaaaaattgtggaggaataagactgatcacagaagtaacctatgaaagtaaaggaatcatataatgtgtactcttttgtctatttttttcactcatcagaattactttgagattcatgcatgttgttttatgtatgcatagttaatcctttttattgctgaacactattccattgcatggatataccaaaatgtgtttattcattcacttgttgacaagcatttgtttttatgtttttttgctattacaaataaaacattcatctgccaaaaaaaaaaaaaaaagaactggtgagttctttagctctatttctatggatggaaagctggattaattttcaacattgtaggacagtaataagtgaatatttattctttaattggaattatgtttctttgagttgcttgtcactaatacgtagtgaatcaatggaaatgaaaaggacactcataaagtaactgcatagtgagtacataaaccaaaaccatggctatctttttaccctgtgctacagcaaggctagtgaaacaagagcaacatgaatatttttaagaaagagtatcacaatggtaaattttatttgtagggcattatgtagaagagaaaattttcaggaataattatattagactcatctctttgatgacagacactatttcctattcatattgcaaaataattggcaagtacatgttttaaaaaaatgagtgttttttttcctgtgagacatctgtattttactacaggtgggacaaagttatttcggtccttattttgccactaggatattggcaggcagagggtgacaaaataatgtaacatctgaaatttcaggctatgaggaaactcacatacatacaatttgtcagacaattaggatatttctaaaatgtgaacagatgtataatagaaattagcaaaatgaaaaatgacctttttttgtttttgatggatacataaagaatttatatgcagttttctaggttagcctagttaaaacctcttctttctacatattcagttaagaaataattgttaattgagaccaagacattataattgtttcccttttgtattataataatgaaaaatatcaagaattatatcttataactttttacacaggtccaagtgatgttttctgaacttgcatgccacatttttttagccaagtgttcaccagttgggaactcctaggggttgtttatttttcagtgaaagacaatcttttaaggagtttatgtcctaaatattttctggttttgcagtagcatacatcagacatagtcattgtgtttggattgggattttcacttttaacatgttctcaaattctctaggcgtttaatgtttccatctggtcctcataaaaggtttcacatttgtaatgcagctcaggctcctactcagagagcatcattataattctatccatgactctagtttgatagagcagatacttttaaaactttggatttgttttttgcttttgtgttctgtcttaaacctaggaataacacttgagtttaatggttgtttctctctgaaaataatcatagtgtgcacaccatgacaacaggctcacaccccacttccttctgtgccgtttgaagctcctagggcagaaggagtaaccacattgtgagcccagtatgaggaaacttagcagtcgtcttactttctcttcattaaacaatctgttctcagtcatcacagatggagaggatattttcaaggacttgaacattttcttgaaatagccaaacaactaggaatctccttttgccatgttaaataataggttctagggcacaatttgagcaaagttcacagcttctagcaaggtctttttatgtagttaggtgtgcagtgcatgtggatttgtttagtgagtatgtacttaagtaacactatatgtcaggcaatgctctaactaaacttcacaaatagtaactcatttaatcctcacagtaactttatgaatacggtactattagtatccccatccaaggatgtagaaactgaggcataaggcaaaaagaccacagctagcaagtggaagagccagaattaaaacctaggtggtctggctcaagaatccatggtcttaactgtgaaactgtgctatgactgaatgtgttcagtgtcagattttcaaagatctattattatcttcccagaattgaattgcacactttgtgtaactctccccaacaccattcttgattcataattggtactcagtgaatgtttttttaccttaggatttaattaagagtgagtgaaatgataactgattttgccatcatttgaaaaaaaggcagaaccaaaggtgaatcataatggtagccagtggacaggcagtttttcattcagaagtgtcaatggatcccgttatccaaggataacctatatttaaggcccagatacttctaagatgatgctttggattctacattttcaaatctggaagaactatcttcatttcactaattgttctttactgatacagtttttttaaatttaagtgtggtgaaacacaacccaaaatttaccatcttcgctatttctaggtgtacagttcagtagtgttacgtaattcacattcttgtgcaaccagcctccagaactcttttcatctttcaaaactaaaagtctataccacttaagcaaccactcctcggtttttcttccctctaagctctcagaaaccaccactttttaaaaaaaaaataactcatccacctatggaaatttaggttgcttccaccttttggctattgtgaataatgctgttatgaacatggatgtaaaaatatctctttgagactctacttttatttctttggggtatatacccagaaatggaagtgctgagtcatatgataattctatttttaatttatttcccatacggttctccataatgactgtatcatttgacattcccaccaacagtgcataaaagttcactttctccacattctgaccaatatttattattttctgttatttttttctgatagaagttatcctaatgggtgttagatggcacatcatcttggctttgatttgtattttcctaatgattcgtgatgttgagcagcttttcacgtgattattggccatttagtatcttctctggaaaatgtctgtttaagtcctttgtacattttaaaattggcttgctgtgttgttgttgagttgtaggaattctttatatattctaggtattagcccattgtcagatatatgatttgcaaatattgtctcccttctgtggactggcttttcactatactcttgtgttctctgatgcacagaatttttacatttttatgtagcctaatttatctactttcacttttttgcctatgctttctggtgtcatagccaaaaaatcattatcaaatctagtgtcatgaaccttttcccctatgtttccttatagaagttttatagtttgggtcttgtgtttaggtttttgatccattttgagttgatttttgcatatcgtgtaagattagagtccaactgctttcttttgcagtatccagtatcttttgcagtatgttttgttggtacccagctctcccaacaccatttgttaaagaaaaaaaccatacagatttaagggaaactcagaccacatagctataaacctggagttcctctcatactttggtccaaaccataatagatttagaaagaatcacgactaaagttctcaactgggggctcttttctcctggcgagaacatttagcagtaggtggggacatttttggttgtcacatcttggggtgggagtgggggtagcagttgttactggaatctagtgagtagaggttacgaatgttgctaaataccctgcaataaacagctccctaaagcaaagaagtatctggcttcaaatgtcagtagtgctgaggttgaggaaccctggcctagagtatagggaagtacaggttatgttgtaggactggaaaattggggaatctcctttttttgccatttgagggcttgatgatcattgcacaggtgactacctaagtgtccaattattgactacttggtagttggttttttaaagatacctgaatttcatatacatccagttaggttttaacaacagaatgctattttgagcttaacttttgcctttaagactgttcttctcactttctttcaccataattttgtccatttatgcattcattttctcttttctgtaagaaaacaagtaaataattgtaggattgatcataagaattggagtcctattagactatacaataatcaaggattacagaaatgcctagagattgttttggcctagctgctcctcctacttctgagctacttacaggagaaagatgcccaattgacaatataaacatgaaattaattactttataataaatagttaatttataacacccaggcttgtgtttaaaattccagagcttggctctctgctgaactgagctggagtacacgacttcagcccaaagtaattttatattgggtgtttatggtcagggaaacttcgttgcagaggtcatgcttgagctgagacctgactggctaaaagcctcaagccatgagaacatttggaagaagagtatttccacaagaaaaaaaaaacagaaaattaaagtgcaaagatcttaaggtaggaataaacttggcatgttcaagaaatagaaataaggccagtgaggctgatgctctgagttactgaggataacagaagtatgatgcaactgctgaaatcaaattaatatttctttttccagaggaaaaggtggggggtgtttgattagaacttctcctggtataaggggagattctctcaaccttggacacctgaagttggcaggtgtgtaaagcattggttttgtattgcatggttggttcacgttatcaattactgtttaagtatttatttattcacttttcaaaaactgctaataattttctatattctaggcaccattatagggctaggcattggagaaattgagatgcataagacaaaatgcttatgtttaggagctcgtagtgtgcatttatggattggatagttggatagaactcttctaattattgactatgtgaccttgggaaagttattaaacctctctgtgtctgagtatctccatctctaaaatgagatatttattgcagttacttcatggagttgttgtgaggattaagtgagttaatacctttaaagcagcacctgagacgtaataaccactcagtaacttagctattattgttgtggtggttttacagaagcacaggaagagactcattaattcagtctcaaaggttagagagaatttaaaagaaaaggtgaagtttgagttcattcattaactcatcatttgtttgataaatatatatcaagtgcctactgtattccacatactacttttctgctacggcacatacttctttcttgctgcctggattatctttgacaccattattcagctgtcaaactttaacatccacatcatcctcttcaatgtaaccttcttcagtttaaggaagagtatatattagagataaaaattgtacaaataataatttagttacaattgtcaaccatgatatcaagtgtaatccagtcagtgagaggaaaaatgcaaggaacatctaaaaagtgtgaaagataaggaaatgtcttagctaagagatgcaatatatgagagataagaaatgcaaaatatcataagaaaaaataatcataatcatcaactttgtaggtttcccaaacttcttatagtttatgtatttatcttctaattttctaagagttgagcacttataaccaaaagggcttcaatgcttgcttttgagtcagccataagtggataaggagcaaaaggatgcagcttgctttcaacgccaagtcagacttgtgttggaggaggtgtttagggatgggttttctaagggagaagaatatgtagggcacctactgaaggagaagagtatgggctctttggccattcttgcagagaaaacaacagagtgtgggtgggataaggagcagaactaggctagaatagggagcattaggttggaacaggagggctggagggtagttctctggaattttgattgtgcctatataagcaattctttgcctttttttggatttacatacttgatgtcttctttcagactgttgaatattagagcaaacatttgagagcagagaatttattgtatttgtgtaaccagtatctctcattctgctgcatatatataaggcctttagtaaatgtttgctgaatttccctatcaatttatatatcaattaatgagataataaaatgagattggaagaagaggatcatatccagtagacctagcctataatttgttcaatattgatgtgtttaaaaattaaaaaagctacctagataaaaggccaaaatataacatgtagttatgacagtcagggtttatttagcatttctataagccagtagcctttcaatttattctgcatgtattcagtggtggtggtagacaactggttttgagtcaaaattgcatataggatcacattttcttgctaattcaactttcttagttctaggttggtaaatattgtagaaaaagcaaaatgtttcccacatgtctacagattttcttgctttaatagcttcatttgtgattttgggaaccagaatatttttaaataaaacaagtcatttattcctggaataagtccctatgccatgcatgtcttgagattagaaactcagctgagagcaactagtgattattccctgactacaactatttgtgagatacagaaatcttaatgatgataatccagtattagtgagatttttaaaaaatatatatatatatattcaagggtgctttccaagaacaatttatacctcaccaattatttactgagttgtatgtggaaattggaattaactggcaccatttatttcagttacattttgaaaccacttacagattgacacctgggtaactggctatattttatatagctctgcacggatcatagagttttagaggtagaagttagttttttcttttagtgttactcttgtaacaggatgtatttaactgtttcagcaaaaggaagacagacgtttccatctaaagagtatgtggttttaggccgggcacggtggctcacacctgtaatcccagcacttagggaggccaatgcgggcggatcacgaggtcaggaggtcgagaccatcttggctaacaccgtgaaaccccgtctctaccaaaaatacaaaaaattagccgggcatggtggtggcgggcgcctgtagtcccagctagtcgggaggctgaggtaggagaacggcgtgaacccaggaggcggagcttgcagtgagccgagatcgtgccactgcactccagcctgggcgacagggtgagactctgtctcacaaaaaataaacaaaataaaataaaaaaagagtatgtggttttgacttttataatacagtagattctgcttgaataaattttaagattaagtattttaatgtgctttgtgtagatacaacagaaatatcaaaggacaattccaatatgaggttaatattttaatatcttatatcaaaatatctgagcacctagaaactggcagtgacaattaacagcttaaatgattcttcaaataattcaatttaagggtaggatttggaaacaagtagcattatcagactgaaaataacaccattttataagaatgtctatggatacaatcttaagttagtggcgtatgccttttatatatttatccaaccattatcctctatgtgcaaagaatgtgatctaaagaatgtgttaaggcagataatacgtgtgtattataataattaaaaggttctgtgatacagactctgacctgaggataaagtactacaagatataataactaccataattttatattttataatgataaaactacctatagaatgaaataccttatatcttactttttgctgcttttgggttaattatgcacttaaataaatggatagagttcttacttaccgttttcacatttaaattcatcctgatatgatgacatatagttttaatgacctggttaatactgatgaaaactttcagtggcagtgcctggggccagtagtctgctgcatattttatttttatattattgcaataataacaaaagatattggtgcttcttttcacctacaaataatcaattaaggaactgaagcttaatttatttaaaaagcaatttttagaacaagtcgatagttcacatagagctatttaaatgtcccatgcaaattgatggaatgttctagcaaatattatttagaaaattattattattgttattctttttttttttttttttgagatggagtcttgctctgtcacccaggctggagtgcagtgatgtgatcttggtttgctgcagcctctgcctcccaggttcaagcaattcatctgcctctgcctcctgagtagctgggactacaggtgtgcattgaaatgcctggctcatttttgtatttttagcaaagacagggtttcaccatgttgggcaggatggtcttgatctcctgaccttgtgatccgcccccttgacctcccaaagtgctgggattacaggcatgagccaccgtgcccagactagaaaattatttttaatagctcacattctttgcccagtcatttcacaccggtattccataagagttcccttgcagccagaaacagaaaggattagattttaatatcatctaacaatattcttttgttgtttaatcacactttatagtgctaacccaaatctgatctggaaatctgttcagatccagtttgaggaactagttgagtagacaatactctcagagagctacaggaactaaatgtacatctcttgttcatttgtagacatcattcaagcctcaggcttggattcttcgtttaggtctgccagtcaacaagaattcactgggtggttactcatgacagagacctgtatgagactgtgtacatagaagtcaaagaaaaatagttactatcgacaagcatatattgatacatataggcacaatttttctttcaaaagtttgcattactgttgaggaaagtagacatctatatttttataatgcctatttgaaatttgtccaggaaattctgttgctggtcaacagtgtagctaggcctggtataagaacaggtcaggtacagtaggattctgattaaggcaggtgtctggcataaaaatagtgaacgttaggaaggtaggattcctggtatatagcattacttaaagaacactttgaactcttttttttttaatatactttaagctctacggtacatgtgcacaacgtgcaggtttgttacatatgtatacatgtgccatgttggtgtgctgcacccgataactcgtcatttatattaggtatatctcctaatgctatccctcctccctccccccaccccatggacaggccctggtgtgtgatgttccccaacctgtgtccaagtgttctcattgttcaattcccacctatgagtcagaacatgtggtgtttggttttctgtccttgtgatagtttgctgagaatgatggtttccagcttcatccatgtccctacaaaggagatgaactcatccttttttatggctgcatagtattccatggtgtatatgtgccacattttcttaatccagtctatcattgatggacatttgggttggttccaagtctttgctattgtgaatagtgccacaataaacataagtgtgcatgtgtctttatagcagcatgatttataatcctttgggtatatgcccagtaacgggatggctgggtcaaatggtatttctagttctagatccttgaggaatcgccatactgtcttccacaatggttgaactagtttacagtctcaccaacagtgtaaaagcgttcctactcctccacatcctctccagcacctgttgtttcctgactttttaatgattgccattctaactggtgtgagatggtatctcattgtggttttgatttgcatttctctgatggccagtgatgttgagcattttttcatgtgtctgttggctgcataaatgtcttcttttgagaattgtctgtttatatcctttgcccactttttgatggggttgtttgattttttcttgtaaatttgtttaagttcattgtagattctggatattagccctttgtcagatgagtagattgcaaaaactttctcccattcaataagttgcctgttcactctgatggtagtttctttggctgtgcagatgctctttagtttaattagatcccgtttgtcaattttggcttttgttgccattgcttttggtgttttagtcatgaagtccttgcccatgcctatgtcctgaatggtattgcctaggttttcttctaggatttttatggctttaggtctaacattcaagtctttaatccatcttgaattaatttttgtataagatataaggaagggatccagtttcagctttctatatatcgctaggcagttttcccagcaccatttattaaatagggaatcctttccccatttcttgtttttgtcaggtttgtcaaagatcagatggttgtagaggtattatttctgagggctctgttctgttccattgatctatatctctgttttggtaccagtaccatgctattttggttattgtagccttgtagtatagtttgaagtcaggtagcgtgatgcctccagctttgttcttttggcttaggattgtcttggcaatgcgggctcttttttggttccatatgaactttaaagtagttttttccaattctgtgaagaaagtcattggtagcttgatggggatggcattgaatctataaattaccttgggcaatatggctattttcacagtattgatacttcctatccatgagcatggaatgtttttccatttgtttctgtcctcttttattttgttgagcagtggttagtagttctccttgaagaggtccttcacatcccttgtaagttgtattcctagatattttattgtctttgaagcaattgtgagtgggagttcactcgtgatttggctctctgtctgttattggtgtataggaatgcttgtgatttttgcacattgattttgtatcatgagactttgctgaagttgcttatcagcttaaggagattttgggctgagacgatggggttttctaaatatacaatcatgtcatctgcaaacagggacaatttgacttcctcttttcctaattgaataccctgtatttctttctcttgcctgattgccctggccagaacttccaacactgttgaataggagtggtgagagagggcatccctgtcttgtgccagtttttaaagggaatgcttccagtttgtgcccattcagcatgatattggctgtgggtttgtcataaatggcttttattattttgagatatatgccatcagtacctaatttatttggagtttttagcttgtagggctgttgaattttgttgaaggccctttctgcatctattgtgataatcatgtggtttttgtctttgattctatttatatgctggattacgtttattgatttgcatatgctgaactagccttgcatcccagggatgaaaccaacttgattttggtggataagctttttgatgtgctgctggattcggtttgccagtattttattgaggatttttgcatcgatgttcatcagggatattgatctaaaattctcttttttttgttgtgtctctgccaggctttggtatcaggatgatgctggcctcataaaatgaattagggaggattccctctttttctattgattggaataatttcagaaggaatggtaccagttcctctttgtacctctggtggatttcggctgtgaatctgtctggtcctggactttttttcttggtaggctattaattattgcctcaatttcagaacctgttattggtctattcagggattcaacttcttcctggtttagtcttggactcttaccattgattgtgtggggattgtaaatggtgacaatctgttggtaccttggagagctcccaatagcctctatctttgatttgttaaggtgctactgaggctttttgttgtcttagctttaggcatactttataagctctgtcatcctggtggatctaaaaggtagttaatgcagctgtacttcaatttgctgtgttaggctgtgtggtactcggacattatctacattctgttaaaaccttttggccttcacaccagatcttaggcaatatttttgggttcctcaaagtttcctatgcactaaggaggatagataggcttatcagttcacaatgttggcacactttgtctccaggggaaagagcattttttggcacagacaaaagaagtattgccaagaacaaggtagcatatgctcagatccaattagtggcagagacaataaacacagtaagagttcagagaaggaagttgtttctgagggctatggaacaagtgaaaagctccatgcaatagcaggccctatagtaatgaaagcattcaggtggaagagggaattccaggtgaaggaaatggttaacaacattctattgatttcaattgaagaaaattacaaggcaaaatttttatttttaattagcctataatccacctgagggagaaaagaaccatgaaagcagaaaccaacattagatcaactaccatttatgtagtaaaaagagtaataagatatagtgtaaacttaataataatgtttaggagataaagccttaggaataaaggatctgtgttgggtagggttatttagggcactcttgatttcagttattattttgtttcttatattagtacttcattactatatgtgtctcaagtggagagttgaactcaggaaaacagcctcagaaagaaaaagaaaaaaaatactacatactgatctcagttatacatattttgataattaataatgtgaattgtttcaggcggtttattttttaccttttgtgctgcctacccactacttttcatattccagccagcctcttgactttggtgttctccattctgagagactgtccatacaagtatcctccattaatgtgaagtagagttgcttatacttacaaaaagtcctagaggatagaaaaacaatcaataatgggtgcaaataatagataaacactatttttgatagtattcagtaggtctcttaccaagttattttcagaatatctctaaaaaatattaatctagcatcactataccttagagttggaagtgcttcagagatcatctcatttaccccttactcaatcagatagccatccaacttgcatcacttctgtgattactaggttctgtctgaacattttcagatatggaaagcttgctacccccaaggaagccattctgctgttgaccaacacttagaaaggtattgcattaaactagaatttgtccctatgactttaaatagatttttccagtttctttccaaagaagctacaccaactgtgtcaattcatacgtttattcaacaaaatgtacaggtcatataatatatgcaaggaattttctgagccctacaaatgataacttgataaacatggatataatactgtcttctatgagaaggcagattcttaatacatttttttggatcagtaaatagatggatagatgaatctttttcaccattaaataatggtaaactcttgatatataggtaaagttggtgtattccttggtaagtgaaggatgtggaatgagcattttaatatcctaatatcctctagaatggtgatgtattttatttcatagcctatcagtgtaaaaaagaggcaaatacaatatttatatatttattttcaaattataaatatgaattacttaactaaagtattatgtatatgaactaaatagatgtttttaaagatttaacataagtatatatagctatatattttaatagtttatacagtgccctatataacccacaagtatgatttatagctttgttaattatttaaatatactgcctttctagaaaaccagcattttagttgtccattacatcttagttgttttcctaactggagtcaagtgatcacaatatggtagcatttaagatttggcttaagaacatattagaactcaccaagtttttcaaaaaataggctttgagacaatattaagaaacagagtacttcaaggaaagaagtgatagaagtaatttatgaaaaacaatttatatgaaagctttgtactttcaatataaaagtactatagaagtaaaacactataaagatggataaaaaggagaagtttgaaactgtcaagtaagctaaattccttatctctttacaagcctaataacccagttggaataactcatagagtataaatctgggatctcattaaaaataaatattttccagtaacacaatgatgcagaggcaaaatgtatgaaatagaaaataaaagaaagaaaataatgacttcatactcttcttacctattgtctgctatgccagtttggattaccacaccacaggtttagcttgagactgaactcataatttcttcccagactaatgtttccatgtgagtttcctaattctgtgtatggtgtcaccattctctgggtgtcccaggcccccaactttaaacttaacccctgttccccatttcatgactaattgtttaccaagttattttgattctctgcaatatccagcaagcaaattatcccatgtacttaggtacagtaaaaatttaggactgctaacaaccacaaaggtttgtgctttaagtttagttgtgagctctgaaaaatgttagagtattaagtgtcaaacttaagatggcaagtccattttcataatttagtttttagtttcaattttgaagaatctcatcaaatgtatatgtctcagaatacaaacctttaataatataattatttttctggtcagttacatgttttattgttttcttgatccttagacttacaacttcaaataaaaatgtaaatatctgcaacatttgggcaatattgctttataaatgaaactgtacatacaagttcagtttttcacttttacaaacctaggaaatgcccttgaagcatgaatgacagtgtttcctcaagaggttcacatcctattacagtagaaggcatggtcaggactcatgcctacactttcagctttgacccaccctggctttggatcttgggtaaatggttagtctcactcagaataaaacttatactagacttttcatgtcaatggtccctttctatgtctagctaacattgtgcctcatgtcctctattatccccatctggccctaattaggtgaggctgtatcatggcagcatagcttcgggattaagctctcaggcttgaagtcagattctttgggtatatgtccctgttctgctacctatggtaacaggacagaagcatttaatctctatgttttgttgtctgatttgtaaaatgaggtaataataacacttaatttatgggtttgttgtgagaataccacaggttaatatataaaagttctgaggactagcacataataactactatgtggttgctattattgatattcatataaagcactcagcaatgtgcctggtatatagtgtgtgctcactaaatattaactgttattctcattgccagactccacttcaatttctgtaagctttatttcagactttggtcacaaaacaaaatagatgaaagtatatcctcataacacaaatgcgtgttcttcacctcaacaaaccaaccaattatggcgtcctgagggagggtgtgtgcgtcaccttgcaatgttgtaacatatgcctgcaaaggactattctacaatacatggctcagtaaacttacgtttttcttaacagctgcaaactaagatttgttttgaataatcctattagtttgtgccagtgttactgtgaaagtgcatattcaaattcttggcctttgttttacctgttagctttaatgtattttactttttaatattataatctactaaaatctaaaaatatgtgtattaatctgtttcatgctgctgataaagacatatctgagactgggaaggagaagaggtttaactggacttaccacatggctgcagaggcctcagaatcatggctggaggaaaaaggcacttcttacatggcagcaacaagagaaaaatgaggaagaagcaaaagcagaaacccccgataaacccatcagattttgtgaaacttattccctatcacaagagtagcacgggaaagactggcccccatgagtcaattacctccccctgggtccctcccacaacatgtggaaattctgggacatacaattcaaattgagatttggattcagacacagccaaaccatatcattctgtgcctggccccaccaaatctcatgtcctcacatttcaaaaccaaacatgccttcccaacaatcccctgaagtcttaactcgtgacagcattaacccaaaaatccacagtccaaagtctcacctgagacaaggcaagtcccttccacctatgagcctgtaaaatcaaaagcaagctagttacttcctagatacaatggaggtacaggcattgggtaaatatagccattccaaatgggagagattggccaaaacaaaggggttatggggcccatgcaagtccaaaatccaacggggcagtcaaattttaaagctccaaaacgatccctgactttatgtctcacatccaggtcacactgatgcaaggggtgggttcccatggtcttgggcagcttcacccctgtgactttgcagggtacagccctccctcctggctgctttcacaggtgggtgttgagtatctgcgacttttccaggcacatggtgcaagctatcggtggatctaccattctagtgtctggaggatggtggccctcttctcacagctccactagacagtgccccagtagggactctgtgtgggggctccaaccccacatttcccttctgcattgccctagcagaggttctccatgagggtgccgcctctgcagcaaacttttgcctgggcatgcgtgcattttcatacatcttctgaaatctaggcggaggttcacaaacctcagttcttgaattctgtgcatctctgggctcaacatcaagtggaagttgccaaagcttggggattccaccctctgaagccacagcctgagctgtttgttggctcctttcagccaaggctggagtggctgggacacagggcaccaagtacctaggctacacacagcatagggaacctgggcctagtccacaaaaccaccttttcttcctaagcctcaaggcctgtgatgggaggggctgctgtgaaggtctctgatgtggcctggagacattttctccatggttttggggattaacattagactccttgctacttatgcaaatttctgcagccagcttgaatttctccccagaaaatgggtttttcttttctattgcatagtcaggctgcaaattttccaaacttttatgctctgcttcccttataaaattgaatgcctttaacaacaccaaagtcacctcttgaacagtttgctgccttagaaatttcttccatcagataccctaaatcatcctttttaggttcaaagttccacaaatctctaggggaggggcaaaatgccaccagtctttttgttaaaacataacaagagtcacctttgctccagttcccaacaagttcctcatctccatctgagaccacctcagcctgaattttattgtccatattgctatcagcattttgggcaaagccattcaagaagtctctaggaagttccaaattttcccacattttcctgtcttcttctgagcctttcaaactgttccaacctctgcctgttacccagttccaaagtcacttccacattttcagatatcttttcagcaacgccccactctactggtaccaatttactgtattagtcctttttcacactgcttataaagacataaccaagactgggaaggaaaaaaagtttatttagacttacagttccacatggctgcagaggcctcagaatcatggtgggaggtgaaaggcacttcttacatagtggtggcaagagaaaaataaggaagaagcaaaagcagaaacccttaataaacccatcagatttcgtgagacatattcactatcacgagggtagcatgggtaagaccggctcctgtgattcaattacctctccctgagtccctcccacaacacatggaaattctaggagatacaattcaagctgagatttgggtggggacacagccaaaccatatctgtatgtgattagataggaagcttgctctaagttggtagaatgtaatttaatgcaagagagtttgagttgaaacagtttgagataaatatgatttatattacaaatattttacagcaaactttttcaatttgtcattattgaaaatgtttcagataaaaatgaaagatgaagagtctattgactcttttttcttaagctaaaatagacaataccaatattaatttatatatagtatgtatgaatgttacttttgctttttgatatgaaatataagtcatatgttactataataataagcactactgacaaagtttcttcttaattgtaatctttacagcataatgaattcatcttcctacatctagacatgcaataatgaaatattttaaatactgaatttaggatgaatttgattttatatatgcttaaatttgaaataaccactttcaaatttctcacccagtgattataacaataaatgatctttgctagatatacaaaggtactttcaagcaatattccttttgttgcttaccacaattatgaagtctaatttcagaaatctcagattaagtgggatagtcaagcatagtgacagaattggtatttaaacctggactgcttcaatgcctaatctgttgagggtttttttttttttttatcatgaagggatgttggattttattgaaggctttttctgcatctattgggatgaccatatggtttttggttttgattctgtttatggggtgaatcacatttatttatttgcatatgttgaaccaaccttgcattccaggaataaagcctacttgattgtggtgaataaaccttttgatgtgctgctggacctggttttctagtattctgttgaggatttttgcatctatgttcatcagggatattgacctgaagttcccttttttcagtgtgtctttgccagattttggtatcaggaagatgctggatttgtaggatgagttagggagaagcccctcctccttgactttttgaaagggctttggtaggattaatatcagttctccttgcatgtctggtagaatttggctgtgaagccatctgttctggggcttcttttggttggtagtttttgtagttttttaaattactgattcaatttgtgaactttttattgttctgttcaggtttttgctttcttccttattcaatctactatttgactcagcaatccactactgggtatatacccaaagaaaaataattatatcaaaagacatatacacccatatgttcatcgcagtgctattcacaatagcaaagacatggaatcaacctaggagcccatcagcagaggataggataaagaaaagtggtacatatacaacatggaatacgatgcagccttaaacaagaatgaaatcatgtcctctgcagccaacatggattcagctggagaccattatcataagtgacctaatgcaagaacagaaaaccaaaaactgcatgttctcacttataagtgggggctaagcatttaatactcatgaaagtaaatacaggaatgatagaccctggggaccactagaagagggagggagggaagagggcatgagctgaagaaccatctgttggatattatgctttctgcctgggtgacagggtcattgggaccacaagcctcaaccacaggcaatttacccatgtagcaaacctgcatgtatatcctttaatccataataaaagttgaaattaataaaaataaaataaattgtacaaaaaaacccttggacttctaatgccaaagactacatttccaggtatttaaagtaaatagactaaaataattgattagagaattttaggtgagaggaaaacaccctttctctgtggattaataaaaacccaattaatattctttctttttattctcacctctcattcctttatagagaagagcaatggaaagaagaagggagcagggaaacatggtcaaggaaggaaagtgattctcaatcaggagaaaaggtagctctcactggtgaaaatttggtgcagtacaaccaaaatacaaaatccagtttacaaaaaatgaaatatttcagtgacccatatatttatttttctgtgtttttctgcatgggtttgggttttttccctattatttcagaattgggctgtagcctgcaagtaaattaaagaacacttgttttcatttttaattattgatcagctgtctctaaggttcatttactattaatgcagaggtagaattgtgttttttccatactctttagttcttgatgaaccccatatggttctggtgctcacagctcttcaataattcaagattatcatggaaaaataatcaagttttgaaaatctagatcagtggttttcaaagttttttctcctgtcaacaatagaaatattttttttctagttaaattatgatctggactcaaacttttaaactgtgtttaagtggagctgcttggcttttgtataagaaggaaggtttctccatgactcaattaactttccatcctctccggtgaccccagaggtagctctttcaaaggttggggctcctgttgaacagaatttgaagtacactgagatagatgaaaagcagttaggatgtagctcaggctgagttctgagatagagctgatctgggttcaaaccatgaacctcaccatcaactaggcttgttaccaacagcaggtagctgaacttctctaatatcagtttcctcctcagtataagtggggagaaaataatgcccacctcataaaactgttttgaggattgaaataatgcataagaagtatttggcatgtattgttacttgtgtcagttaataatctcttctgagacatattctatagtgatacaatgttggcagtatgatgaagccatagagataatgctactcagagtacagactgctttcttgatgacagacctgaatatttcaaattataatcctaggaggctatagtttatgcttttttccaactctaagatttgtataaagacacatataaagtgtatccattttgaataatacatttaaagggatactttatcccctaagatgctgcactggtgaaaatccctaggataatgtgtaatcttctttgacagtatgtgcacgtaaaatagtttcacaagtgcaagatggcaaatgtaatcttcccatgtgcaaatagactttattccattgagggtagagtctctacagctgagttttttaatgccatggtatcatttatctaattttttttttttttttttttgagaaggagtctcgctctgtcagccaggctggagtgcagtggcgcgatctcagctcactgcaagctccgcctcccaggttcaagccattctcctgcctcagcctcttgagcagctggactacaggcgcctgccaccacgcccggctaattttttgtatttttagtggagacggggtttcaccgtgtcagccaggatggtctcgatcttctgaccttgtgatccacccgcctcagcctcccaaagtgctgggattacaggcgtgagccaccacgcccggcctcatttatctaattcttaataagcaatccattttgctttgtttcttctctccctcgcttccttctcttcttccttgcttctatttggtgccaaacaccgcgttttatttatgatattaaaaagtaaagtgagtgtgatggtggctggtcacccattgttttgaattaataacagaaaaaaagaaatattttagtggcccatatgtttatttttatgtgtttatgtatgtggttttggggttttttagtgccttctatccctagaagtcactttaatctcaagactgtccaaataaacttttcagcaaaagcatcaggtgagaagtctgggagaaaccatcctataaaacaatatgaacagaatggagcagtgaacacaatgctcccattctttctctgtcctccaagccatctttcttcttatagactccctgccatgtgttgcctggctcaggttctacatgttcatcctgccatattggcactggcttctttgaattctgctctagttctgagacggtggcgctttattcactactaactcccaggaccagtgcatgctattcttcaatttattgtgtagattaaaaggtatcttcttaaaaaatgatgcatgctgctgggaaatacagacactttaattttacttagaatcttacttggaatgtgttagtagccagataaacaagcaagactgactcaggaaagaagccagagaaagggtaagtgtgtcaagcaaaagtagacagcagcaccaaattgaaaaaaaaaaaaatgagaggaggagaagaggctaaaggtacatctccttttacttttctttctttctttctttcttttttgtaattttgctttaagctttccattcaaattatcttatgcttcttggactagctattaatattagacttatggttgattagcatttcaaagagatagaggcaatgtatgatgattctgagtcacctactccattgaatgacagcttgactaacccagtgacacatacaggtctcagccacacccctatcctgaacgtgtcttctcagaattctctcccttaatcttgatctttgtgttcttctttgactttccattttatgtctcttttgcctcttgtaatgaattctctgttttcctaatcttcctccttacctctttcaaagtctgtgtatttctttctccctctttgtgagtgagctttctctctctctttttctctaatattttgcatacccttaattcttatctgtacaagccatggattttgaattatatatttgaaatattaactgcagctatttaataaagatttacaactctaggtttctgttaaataacaagtagttgaaagttaaaaatttcacattttacaggagaggttttttgctatgtaagccacttcttctttggactttaggtcagaatatttaagtagaaaaagaactatcagttctaatttaagctgttattttaatgttatagacagtaaatttaaattattcatggcattatggaatattcctgggtttcctgatcctctagttttaggctacagtgtttcatgaactggcttaactacaaaaaccattatctaaaatccataccaaacattaaaagggcagaaaaggggagaaggcatacagacattgaaaaattctgcacaaacttcagcctgtaagtgctttgaactcacacacaacctttaatgttttccttgcattctttgaatgaacctcacttttctgttcagaaccctagcatgtctaggaacttacattgcatgtgcttaatcatggaagtgaccatatgttctttttatttctaactttatttggctctgtctgccctgactttttcctctctggtcataaagtttttatcttaccattcagtttctcccagaaagcctctgaaccagtccaactttgttatttctgtctgctccccgagtccttgatggaagtgtgggtgaggatgggggactgtttaaacttttcccttttaggttaccatcttatctccttgctctcccagtatcaatattctctctgctagagagcagcttctcaacctacttgggtcccttagggatgtctctgcatactaatctttcagtacttatctgcaatccattacttaccctcattaaatacagtttggatcatttcccagagtcaatggcaaaaataaaaaggaatttttagtttaattaaagactggcaccattttttaattaattttttgacaaatagtaattgtgtatatttatggggtataatgtgatgttttgacacatgtttagattgtggaatgatcaaatcagagtgattagcatatccattacctcaaatatttgttatttctctgtggtgagaacacctaaactcctctcttttagctattctgaaatatctgctacattattattaactaaagtcatcttcctgtgcaatggaacaccagaacttattcctcctatctaactataactttgtacttattgaccaacatctcctcttttcctgttcacttcccaactcccagcctctggtaaccaccattctcctctctacttctatgagtttaacttttttagtttccacatataagtgagattatacagtgtttgtctctctgtgtgtggcttatttcacttaacataatgtcctccaggttcatccatgttgttgcaaatgacagaatttcctgtttttgtaaaggctgaaaagtattccattgtgtgtgtatatatatgtatatgtatatacacactttaaaattattcatcagtttatagacaaaagttatttccatatcttggctataatgaatattgctgcaatgaatatgggagtgtagacatctctttggcatactaattttaattcctttgtgtgtacacccagtagtggggattgctggataatagggtaattgtatttttacttttgtgaggaacttccatgctagtttccaaagtggctgtactaatttacagtagcatcaataatataaagtcttccccttttttccacatccttaacaacatttgttatctttcatcttgatagtagccaccgtaacagggtgaagtgatatgtcattgtggttttaatttgcattttactaatgactagagatgttaagcactgtgggcatttgtatgtcttcttttgagaaatgtttattcaaattccttgcccatttttaaagttatttttttccttgttattgagtagtttgagttccctgcatattttggatattagccccttatccagcatatgatttgcaaatattttctcctaatctgtgggttgtctctttactccctgaattgttttctttgctgtgcagagttttttggtttgatgcaatcccatttgtctatttttgcttttattgcctgtgcttttggggtcatatccaagaaatttctgcccagaccaatatgggtactctcccctaagtactttttagtagttttacagtttccagtcttatgtttaagtccttaatccattgtgagtttattcttgtattaggggtgagataagagtccattttggttcttctgtatgtggacttctgttttctcaacagcatttattgaagtgactgtctttttctcattgtgtgtccctagtgcccttgtcagaaatcaattgactattgatgtgtgggtttatttctgtgctctctgtcctataccattagttgaggtgtctgtttttacgccaatatcatgctgctttgctgttttgattactgtggctttgtatattattttgaaatcctgtagcatgacgactccaggtttgtcctttttggtcaacattgctttggctatttggagtcttttatgattccgtacaaattttataattgttttttctgggccaagtgtggtgtcttatgcctgtaatcccaacactttggggggccaacacaggcagatcatgaagtcaggagtttgagaccagcctgaccaacatggtgaaaccccgtctctactaaaaatacaaaaagttcgccgggtatggtggcgtgacctgtagtcccaactacttgggaggctgaggcaggagaatcacttgaacctgggaggtggaggttgcagtgagccaagatcacaccactgcactgggtgacagagtgagactctgcctcaaaaaaaaaaaaaaaaaagaaataattgttttttctatttctgtaaagaatgacattgggattttgataaggattgcattgaaactgtaggtcactttgggtaatatggaccttttaaaaatattaattcttccagtctataaacatgggatatcttttcatttgtcatcaatgttttatagttttcagtgtagagatctttcactttattggttaaatgtagtcctaaatattttgattttttgatgctattataaataggattgttttcttatttctttttcagacactttgctgttagtgtgtagacataccactgatttttgtaagttgatttatgtatcctgtaactttactgaatttgtttttcagttctagtagttttttttggtggagtcattacgattttctttatataaggtcatgttgtcagcaaatgaagatgattttacttcatcatttcctattttgatgccttttatttctttctcttatctaattgttctggctagtacttcgagtgctatgttgaaaagaagtgatgagagtgggcatccttgtctttttcctgatcttaaaggaaaagtcttcagctttttaccattaaatatgatgttaggtgtgaatattggcatcattttcaacaataaaaatgtttttaaaattttatgttgtggcaaaaattggctatgcaagatatttttatcattttataaaagattatggatcaaaaaatattaatgaaaataaaacaaaatatattaaagcttcctctattatctttattcaacttaggtttaaattgtatgataaattagaaatggaagatattaagaaaataaaaggctttatagaacttttgtagaaatttgaaagatttgcataatttgtatagagtaaaattggggacagttttccatgaggtcataagtacaggataggagggcattaaggtggtggaataaaattggtacatactggtatgggacataattacagcaaaatgtgtgcagggggtaggattcatttattcagtcagttggacagtcaattatatattttacaaattgtctagttagtgttattttgtgccagtcattatactaggttttgggatttcagtggtaaataaaaacagacaacatgaagtataactgtataagcattcattgagtaataacacaataatttaatgattatgtatgtgtttggcaggaagacaaccgaagccatagaaccacatagcagggggtcttgttatgcagagtgtagaatcagagatttccatgatgaaatgatattgaattaaatattaaagtgggagtgaagagaacatcctttctgttttattttgagattggcaaccctcggcattcttaaagttcaaggggaaggattcagtacctagggaatagtagaacatatggaggaaaaaaagatatctgcaagatatctgagatggtagaaataggaaatgaagttgtaggattttgtggtggggaagcgggtcacagtttagtgctttccttaagacaggaaaagatacttgtgattgttttgtaaataggctcttgaacagggaggaaactggtgaagctattgctttaagaatggtggcaatagattgttgagcgattggaatagcttaagagtgaaagaccaggtcaagtggaagatagctgcatctaagcagtcattgagtaataaggtcatgaatcgagatagcttaatgtccacgtgaaaattatcttctatgttttctgttttcgtgacatgttttcactcctattttttttaaaacaaaatgcagttgtgtgtatctcagaagtcctattcagtaaaaattttccctatactctcaggaagagttttattgcaactcccccagaatcccacagaatttgatttctacctcttagtgcacactctatgaaacaatgaattgtttatgttcttgttacctgaataaaactgataatttctcatgggcttggagagttgttatttattttttatagcatacacaaggcagaatttggaaaatattggacacacaatagataacaattagatattgttattgattgactgagtgcctagatgaagagaatcaacatttgcattttttatattttccacaggtagcctgtcttgttgcttttcttcttagtgtatctttaagtaaaagacttcataatttggaaaatgccaatacctttattgttgaaatcaattgcatgcctaaagcagacagattaactgcttttcaagacatagagaattcatggtaactggtttatctaacagtattattattcagtttcagaataatacataccaaaatatgttgtgttttcccattcttagtggctgttctaacaggttcaccaacaacgttgtttacttctctctttctctctcttactttctctcatgtctctatatatctataatctttctatctatccactgatctataatcccatgtatatacatatatgtaccctgaagcgagataaacatggatttaaatcgtgttgccttaatttaactatgactcagaaatgtcatacagtcactgagcctcagtttctgcatctgaaaatggtaaataatttctcttatcttgcagactttaagacaggattagaaataacatcttgtgaagtatttaataattggtagacaattcacagtggctattattttggtgtatactttatggtactcattgttatgtagttgtatataggcataaatggttaatgctattcataactgacaatgtattctgatcctttttggtggacaactgagagaaaagtctgtggtttcagattctgcccctttaggaatggataattgagaggaaggagccgggattcttcattcctctccctccattagcatccaaactggaaccttcatgatggaggataggatggattctcctgttagagaagatagttgcaccatctgaacactggttactcaggattctatgtttatcttttaactttttcaatgaggacgactattgtattggcagaaagagtgctttttgatatggtttatgtatatgcccaactcctaatgcacaaacctgttagtagagcacattcaggatactcaagccctgactactgttgaataaagaaacaataaccctattttatttagaggaaccacctcaaagtctcttgcagtaatgctcaattctcttcccttcctaactcaccaggaagaagggggctggaggcacaaatacatgtttcttcccactcccaaagagaaaggctgtgcagtgggagtaggctagatgttacaattctttgctccattaggggattaaaatgacaggtgacacttctcttttataagctaggcacctaggaaaaaaaggttgcttgttttgggtttgctttataataagaagaatatgctgaagcacagggtgctagaaaataaaagatgggtaagaggtttgatgaaagactgggaataaaagtagttgcatttctagaacagcatgaaaatgtaatcctacaatgtttgagattgccatggatgaagttttaaagaagtgactttgctcaggaaattaagtttttgatcaaggagagtaaaggttaagaaagtatttgcaatttggtatcaggtttagagaagacttcaagtgttatagtatagaggccatttggaaagtcaacccttagcctaaagtatggagaaaggggagggagaggagggcttttaaaaggaagtaggaaagacaaaatcgtatcttgctcatttgataattttgcctaaaatctgatgggactgatcttagcttagtggccccatctttttaaaaacgtttcagcccatcttttctggaattggtaagattggaagtggatagcagctgggcgtgtcttcaaatgatttgttgttgaacagaataattccttttctagaactaacccatactaaggtgttgtatagaggtggagtagggtggtgatagctagttatttattgggcaaacatgctaagcaaagtagcttagaaagtataatggcacaaagataaactgttggcttacttcctgcttagtgaaatattgtttattaagactcaattcatagttggcttctattgattttttaccatccagtactcaaagatgtgcaaaaatgttccagcatttgctcaataatcaaatgatcactttctttgtattgacaatctctcttgatgttagtttgttccacatgtcatccaaggctgacaatcgttatagtagcctcaagtttttcgtcattacaacttcttgacctctctccttctttctctttctccaacttaagacccaggtatatagaaccatttgcaacttctacaacatactgtcattgcttatactttacccagtggttggaacattctaacttacttcttcacttgcctcactctactgaattctcaagacggggctcaatgtcctataggaagcatggccagttgcaggatgaagtcaaagatagctgtctctgctacgtgctccagttagatttctgtgctttgtaacagcattaatcacaacatatagcatgtcattttcctgctcctctctttctgggtcatgaataacttgaggaggaagaatctattttacttttgctttgaaatacacacacacacacacacacacacacacatacacacacacacacacacagaatacctaatgtatgattcaacataatgtctggcttagtaggtcatcagtaggttcaaagaataaatgaatatatgaattgcaagtgctttgcataatggatatgtaataagtaactgttaaataaatgttttcaaaggagttactcttcttgaagaaagcaaacttcttgattctatttttattacaaaagtttaaagatatatttaatgagacattttcaaaggaaatgccataaatggaggtcattaatcattcactaattccttttcaaccaacttcaggtgattgtttcccccaaatcaaataaatgttaaaattatttgtatagctgttaaagtgattgatataacttacatttaaatggaagaaaagtgttttgatagtaacattttcagccccaagatagcatgttttcctcatgtgttttccaaagaaaggaagctagattactatgacttaatttataatatatttcaacattgatggatgaaaaaataatgaagtgtttatttacctgaagaaagtaaattcaaggtccaatatatcttaatatactgatttattgcttatgtaatgtataatattaattatgtacaactgcattatacaacatacataatggcagtaattatgttcgtgtgtctgaaatacatttttgaatgaggtatttatttattgaattcaaagggcagaacaataagttaaaagaaagtataaggcatggccagagctcggtccagtttccagcatacaacaagctctccataaagcataatttctcttttaaggatattgtccttaaggcagtgtgctgtggtagtgttgagtcaagcagtctggacttaataagacgtttccctggcattcaaaagtttttgatctgttaaaggtagaaaaatttttattaaaaagactattttgtattagccaaaaggggatataatcgttgttaatgtaaaaatagatatgatgtattacttaaaaatttttgactctctaatatctttcaaatttccaacaccaacagtaatataagtccagtaagccatgaatcaaattggaactgtacttcagcaatggtgtagttctttgcagtgcagtctattatgttaagtagtttcttaccgtatgaaattcatgtgttcttttcataaacctaggattataaaaagtctaatgtgatgtgtgagtttaaggctatgaatccagctttagggaggtctcattaaggaaaaaggggacagatggatccatgtgcctactgtgtgttatagtgcctactgagtgcttttggaataaaaagatgagtaagtttgagccttttaacaatagctacttcccttagaaggaggaaaggaaattacagaatacctctttgaatttttgaccagttataaattttttttaaaagtgaaataaagaagttaactaattggatttgcttcactatttcagtcaatctgtgttgaatctttgagcaaaactggttgagcagcttacatgacagctctccaagtaaatggaaaatttcccaagctcatgctggttaggaaacagaagtcctcttttaaagcagtgcagaactcagcagtttgggtttcattgaactggcttagtggtttcaacttatataacttccatatggaaagttaaggggaacatagaaaccaaaccctcttattgtaccacctgagagcagctgctctttcgggggtttctggtacattgcctaggaccctggagatcttttatttttcctaaaaatctggaattctgtccaaagaccaacgaaaccatgaaagtcaaacttatgcaaactaatttctaatggcagtgagaggaggaaatccagtttaatctcctttttaaagtgcacaaacacttggaactgtttgacctaacagtcagcaaagggtccagagagaaccaacacaaaacaggcaacaggattgtgttctctagtaaatcatggatggtgaaaaaattttgtttttcttttgaaatagtctagaggcaaatgagaatattaggctgaacactgtaaattacagacaactaggaaccatgattggtaaggactaaagatgcaattttgaaactaaaacaaacaaaaaatttatgtctcacttggttatgggaggacattgagaatcaatgaaggtctgtcaagtattatactaaatgtattatactaaatgtattatatgtgctttgtcatctaattttttatcacttctgtgggtaggaattatttcaacctaatttttgcttctgaagaaactgacagagagacggaatgtgtttctaaaggactgaaaaggggtgaatttaggatcgaatcctaggtgtgtttctacctgttttaaacatactgctttctattttgaggtgtttataatatttcttttaggtatatgaatttacaaatgccaagagtgggttgaaccattcttaaaatattgatagtttcataaaaaatattgtaaaaatctttacatgcctaaaattgattacttctctgagaaagtttctacatgattgaatttgtgtggccgaatgaaaagacatatgttttagaagagaaaagtaatgaatgattgatgattgtgcagtgtttctatccagtgatttagaactcagcttgtttgaattgctttagcagagggatcacaagcgatatatattttttaagtaaatgtttaaaacattggctatatctttaattagagaaaaatttctggactcacgacgagcacagaaatttgagaaaattagtgtaattaaaactcagatgtccagcaagtttgtattatatttcttttgtgcttcataagatgtgaataatattttccaaataattaagactgaatgttaactctgtgagaaaaagaatttatttttagaaatttgaataagaatctccctttaaaatccacatttccatgccatatgtgatcattttatgagtaaaattttacctttcctagaatccaagatcattattataaacatcagctactgagttactctgttaactgccattgatacaatttttacaaaatataaacttgagtaacaactggtcctagatttaacaaacagaaacaaaaattacccatttattgtaataatgacatatttttaaatcttctataactggaataaaataaccagccactatatgtatctgatcctctgcattctcattccaactgcatgatgaaggtcaaactcctgctcaatgcatgatctttgtcacgaggtggagcttaccaggacttatgactgtttacaaactgacctttttctcctttgacccctatctttttcttagtatatgtgctgctgaagtaagcattctcctttgactctttcccttcattttattattatttttttcaatttttcttttcaattttttgtgggtactcccttcattttagaatctcaaagtagcacttagtcaccaaatgtctgtttcttctgttttgaagtctaatctaactcctctggctcccctgagctaatgctgattcccaaagagaaggcacccttaactcaaagttagaaatataatcaaagtccctaagtttcctcaaatatctctttctagcatgtctttctgaactgagtcttatcagaaatttctcctgcaaaaatactttcctggcttgtacttcctaattttattcaagaatgtagcaggaaattcatgaagcattgatgaagtgtctattatatggaagatactcaggttcttcaccacaaagatggctaagacgcatgctcatcccccaagatgcccatgttaaagtggggggcagggacataaagatgtaatatatatatagatgattgtgaaatgatatagacgagattcaatcaaagaaaagatgttcttgaaaagcaaatctcccaccatgattaagagtctgactaagaatatgggaatgaacgtgataggcagtgggctgagagatgtgcaaataaatgctgtgttctaggaaccatgtatagttaaataaggctgagcatagacatgagagagatggggagtggaaggagggcaggctgtaagggtgagaaccataccacaaatgagaccatgctagggaatcagacttgattttacacatgatgggctgcttttggagtgtgtttattttagatgaattattctgtagcaacagtgcagaagagatatttgaaaggggcaacagtggaggcaggaaaaccagttaggaagtgattgttgtcatctgagctggataggatgaagctttagattgggtccatagcgatagagatggaggagagaaaatttagagaaatatttattaaatgtacgtgatatggagagttctaaatgtttaccttgagcagcaggaacagatgcagattttgtggggcctgaaaataaagtaaaattattaattcaaaagcaggtatgaaagtaaatatttatttaaaatgagagaataaatcacaaggttacacactttaataaaatgacaagccacaaacctcacaaaattgagaaaaagaaatgtattttatataagcacaaactcagtatttcttcagttcaactttcctttagccatattccaaaactatctgtactcattctaatatctcccaacgtgaagaaatatgatagagatgaaatcagaattcaaagagaatcaggagtgagcaagatacatcccagaacctttgttcctggtggtaaattaagcaatcatgtctggcgaaagtcagcacttgttatttcttatctgcgtaaaatattttccattttaaaccaagaagactctgaattatcgggaattacatgtttttggccataagagtggaataatgactgtaatcattaacagtaaggagtgagggaggctactcaatgaggaaagaaatgtgtaacattgcttcacttaggaatattatccccctctgctattcactcttttagtgccttcctgaatagaatatcctccaatattcagatacaatgggctctagcatactctttaagaaccaaaatcttgaaatctataatgaatcaatgcagataaacttttctgaactttaattagatttttatctatttgatgtctatgcacagaaacaagatagcaaaactaagaataaataggattttataaattgttttatttaaagaatagcaaatattaactttagagtattaattcctgtgatttccttgatattttttaagacaatcagtgattcctatgagaaatgtggcaagactggtgaaacatgccatcttttaagctttctgttcttcctttgagagacagcccagcatagggattaatgcaggaaccatggagtttgactgatttagttggactccaggctgcttactggttatattctacttaacctttatttgcctcagtttcttcatctgttaaatagggataaaatgacacctaccttactgggttattgagtggattataggtgttaatatatgaaaatatcttagaagcaatgcctggcttctaaggtggctgttattgttgttatccaaagagaaggaaacataattttccttagactagcctagaagtccctgtacaactgagtcagtcagatctccagactttattcctagctactataccaggtatgctgagctccagcccagtgttgctcagtgtgttccatatggatgttctgagataatttgttatgcccagtaagtgtagagctgaattaaatattttagaggtggcagaaagttccatatagtttttcatgctttagactcataactccaaggctatatggatggtctctgaagatgatggggcaatatcctttctatctgttaccgtgagctttcactgaacatgaccataattgactgtgctaagactttggcctttcctacttttgtggtataagttcagaccctttgaagaagcagttcataaatgcaattaaataaatttcaccccaacattagctgtcctgtcctgacaagggaagtgttgcttgtttacttagcacttgtgtcttgttaatactggtgatggccatctgtgggtatgaagagctaatggctgttaagtgacagacgaatcatttccacagagcatgcatacacgttctttctttggatggcgtctacagtttgtccttggcagaccattgctattttcagacttgcttccagtatcctcttgtatgtgttgcctcacagtaacttgtcacttcacttaagcagaaagctcacggttctctcattgctgtacctcctgtactagcctctgaatgcaatgtttgggtgactgccattatcacttcctttggcttttgatcactaaacttccattatccaggcatcacttgtatttatgagtaaacttttccttttgcaccacccccatactccaagtcttatagatgagccatttcctgacagctaaggagcaatcaactccactgtcctcctacataataatgaataatcttttcttgcagtcaataaaacaggctcccacgatcatatccttttatgacttggggatgctggtgaaaaatcttgaccagatattatttgatttgggagaatagagcaatgtaaatatggcattcaatatgctttaaaataattatctggaaggtgtaactttcatgctaaacatgatttacactacaaagaaagtagtctaggagaaataaaccacggaacttgtgggcattttgtaattgtctaatctagctcctttattttatagttgtggatgctggggccaagtagagttgactttctcaagggcacatagtcaaggagcagtggagatgctggaatagagtcttctgattcacagcctattactcttcattctcggatgttttataactgataatatctttgaaaatatctaaatatttttgtttgggaggctacttgagatcacttccttttcactgataggtcagaggacacacaagaagtccactcttaacatatcagtaagtgagtgatggatgaagtgaagaggtaagtgtagacacctccatttttaagttacattgttggggagatgggaagaaatgcttaatgaattagctctccgtctttagtcaatctatctactatgatttatccagtaatgcattggcccccggaacttggtgcttttacatctagcacatctccatatcttatatttgagtaaacttttaaatatttattaattgttattctgagagtggaaatatcgtaagtgtagaataaggagattaggctctactctaaattctattgtgaacctgaatcctaatcatgacaaagtcactactctttgcctcagtttcttcacatgtaaaattgaggtgctgctttaaatagcatcatctaaaattcatttcagatattgtgaatggaaaagctacaatctctgaatgttacaactgtcaggtcagttaccctcatggatttcatacatttcccatgcctggttgttggcagagggaaaagagtgggagtgtggtgtctgtgttagtattgccagctgatgggctttaaaacaggagtagtatggtttgagtaacaaaaataccttcttaggatgcctcaccaaataatagagggtgctgaagagagtatctaagtaagagacctggctatttctggaggtttttcaactagacctacgtttaatatttaaaaacatgaaaactcatgtaattaacatgtaacttatttgtattaaaattagtatgctgacatgatattttctaaaactgggccacatatgcatggatttcctaaataatccttcaagagaatagagcaggaaatgaagtgatatgcccatttgcagtgtggtatggggcttcctgaatgtataaatgtggaaggcagcaaggtggggttggataccagtaatgccaagaacttaatttcagcatttcaaccaccgtgtacatcctcaaaatgcctttcactttaattttgtataaatacgaattggatcccgggttaccttttgctttagagatgaaaaaaatgtatttacgtttcccacacaactgctaggaattaaagtagtgtgaaaactccacacaaataaataatacatttaaaactatttttagaagaataattcaaaaagacagtagttttgggacataggcaacaaaaagtcccttttacctaggtttctttgattcagagattcagcatacggatttatggagacagattatatcctcaacaaattaaagaatacaggatatacactgttgtctaatataatatgaggaaactttaaaatttatttccatgaattctatgttcaattggaaatatatgttcaattgagtatcagtagaaaaatctattgtttttactaatgactcagctgcttaaatgatctattgtatcggtggccagtggcaggaaggaggctctgtgcagtattgttgtaaccatgacattagtgacatcatttagcagaaatagaatttgggacatttggaaaacaaagcagtggcctcttggctcaactttgtgagaacctaataaattctaagaaagtataatggacagtgttgatttctccatatatatttagtgattttacatgtatgcacacacacacacctacatacataaagtatttcatttaaatttacctactaatgtatgatattcgcaatgccgtatagactttgggaagaatgttaatcttgtattgcaaagccatgctctactttaaaagcaatgcctccagatgtacagcatacttaacagggccaagaaaaca

SEQ ID NO: 2064 - RNA, 61264 nt, Homo sapiens
  source 1..61264: mol_type = genomic RNA
catacatttttaaaagattaataaaaataagtcaggtcattttttacccagttattccagttcagggtcttgggtgaccagagcctgtcctgggagctcagggtgcaaggtgggaactaactctggacaggacgtcatcctatcgcagggtgcactcacacacccgcccacacccactcagactggggccattgagacaagccagttcacctagcatgcacagcttcagaatgtgtgaggcaacgggagtgcatggacagaagccatgcagacatggggagaacgtgcacactccacacagacagtggccccggcagggaatcaatattttttcttgtcaatgttgcaagaaaataatgttgaatgacaggaaaaacattattctaggacctactgtatttctttataagtttctctgaacaaactttgctagatcaagttatatatttttttaagacctttgatacatagtgccaaattgccctcccatagaaaaggtgtacttgtttagtcaatctcactgattttgtaagagtgtggttttttcctcctactcttacaaatgctgggtgtaagccttttttcccaattgaaagataaaaattggtacctctgtatttcattttccttcgttaataacaaggttgaatatgtttctgtatgcttacagctatttatattttttcttttttgaactgtctgttttttctcgcgtccatttttctattgggatttttcatattttccttcctgatttgtaggaactcattacatacaaagatgagatcttctgggctgtatttcagaagttttattgtcccgtgagatgttaataggtgaactgaggggaaaaaagacttccatggtcagatttaacacatcatttcctaaacttcattgaccgtgaggacttttttctttttcctcccagaacacccattggcatggttcaggacattggtgttctgagcactaacatttgagaaattgttctgtaaaggatattaatgctttatctgttacatatgtggtgggattccccctcctccgccagtcatttgtcctttcctctacatgattttttttcatacagcttttaattcgtgtattcacatctctcaatattttcttttgtggtaatatagaaggaggaaccctgaagtcatacttgtttgctttgaatcctggcactgccacttgttggggcctttggaaaattaccctgtctgtgcctcaattttaccatgtagaaaatgagaaaaattaatgttaccaaacaaagtgattgtgaggattaaattacttgatagaagtaaagcacagagtattagatgttgatgatgatgatggtggtttactttttggattatatagaaagtctctctccttctctgttgtaaaaaaaaaaaaaattgcccatattttattgtcatatttttacggaagttaattttgatatgagctatggactaaataattttctgttttccccaatgcttagccagattctcccactgcaattaattgattaatgctccccttatcatatactattactttctttttctgggtctttctcttctgctcagtctattctgataccaaggccccttctttcctattcctctttagaacgttcacagctacatttgcctaaatcaagggcacatgttggattccctctgggagttgccccaacagacctttggtaggggagaggggcctgcagggtgggatccaggtgtctctgacacaggtgagaaatgcggatcctacagactgaattttaactgacgctgtgccctgttcatccccatgtgctgctgaggcttggtgttgagggacagcctggggactctcttaggaacatttaaactccagtgttgttcatgttgttcaccaaatcacagaaaaagtgagatcctcatactctaccttgtccctcctcattctgccgcgccagtcaaaatgacctctaaataagcagaaaagatttgattaggggcagaggggattctaacctgacacatcctaagctatggaaagagagccaactcgtctcagttgataggaagatttgatactgggacgctccatgaaggtgatactggagcaccattgaggatgtttcactcagaactgagagtccttgggttgcctgtcaggcccagcacaaccttctccttttctgcaccacatcatctcttgctcacttggttccaaccacaatggtctctttgctgttcctcaaacatgctcccactttaggacatttgcacgtggtttttcctccagaatgttcctccccacatacccacatagcttgttcccatggaagcttaaggcttttgttccaatgtcaccttgtcagtgaggccatccctgaccactctattgaaagctgtgcctggagatcctcaacctttcttgccttatttttctccacagtgccagtcactgtctgaccatctatttctcctcattgtattgttgattgtctctctcccctagaatgttagcttcgaagagtctaccttctgtttggtttcctgctgtactctcaacacctagaaaagtgcctggcatatataggactccactattgtttgtagatagaagagaaaatgagtgtatccgtcaggcaaagtcacttgcatgatacttcatgatgtgtccaggcctagtaacaatagcatgttttctgagaatgtaggctgacttaaaagactctggattttcaagctagcctctacaaataagatatctctaaagtggggagaaaggctgctgatatggtttggctgtgttcccacccaaatctcatcttgaattgtagctcccataattcccacgtgtcatgggagggaccaagtgggaggtaactgaatcatgggggcagggttttcctgtgctgttctcatgatagtgaataagcctctgacggttttataaagggcatttcccctgtacacgctctcttgcctgctgccatgtaagatgtccctttgctctcccttcctccatcttctgccatgattgtgaggcctccccagccatgtggaactgtgagtccattaaacctctctcctttataaattacccagtctcagttatgtctttattagcagcatgagaacagactaatatagccgcatctctcaaaagcgagaacagacatatgtctgcggtaacatcttttatctgatgccctagcttcattcctgagctgccacagagccactcaaaatgaaattcaaattcaaaccacagtgagataccaccacacacccaccagtatggctacaataaaaatgcagaaaataccaagtgtgggcgaggatggggaggaactgaaactctcatacactttgaaaaactatttggcagtatcttccaaagctgcatgtgcatatatcatgacccagcattttcacttctgcataccacccaacagaaacacctacctatgtccagctggaagacaggcaggcacaacattcacaacagcactgtttgtaatggccaaaatctggagcaaaaaatggagaaaaatagtaaaatggattttttatgtggtatattcacacatacactacacaatatatgaaatgcatgatctatgaccacatgcaatgatatagatgtattgaacaaacataatgttgcaccaaagtcagacacaaaattgtataaactatgaatttgcttccatcagtataagatctataaacaggtaaagctatccatgctgctagaaatccagagtgactagaaaggaggattaaggaagctttgggatgctggtaatattctgcttctttactggggttctggttacacaggaatatttagtttctgatgatccatcaagttgtacatgtacatgtgaaaattcctgggtatataaatgttttgaaaactaggtccatgtatcagaaccaccaattggagttgcaggccacacatttgctaaagctgtttgttacaaaaagctgaaactattccaggatgcactgctccagcacttggggtggaggtgggtgggaggaggaggtgggggttggggagggaaccttctgaccctggctgggtcacacctctgagatgctacaagaacgaagaatggtaggggccaggtgtagatgggagaaggcagctggtagacagcctcggctttctgaggtatctgaggtctctgatggcctcaaggcaaacactgcctcctgtcaggctcagaacagtaaagactctccagccagccttcctgaatgccaacagccacaggactgtgcaggtctaatttccaatcagatatgaagggaaggagaatgatctctgctgataaaccgagtctggaaaccttgttatagaatgcagtagaaaaaaagacaggagagagggaaaaacatatgaagcggttcttaggtaatttctaagaaggaagctgcagcaggaactctggctacataccagagatcgccctcttatttctttcacttaataacattaaacaggaaaagaaggaatggaaattcaggaacttcaaggtcccactagggcactgaggaccagtgtagaggaggactcatcctgcaccagacctataggcatggattataccatgcccatggtgccaattaagctttaagaatcacacttgctagcattggagaggttagggggtcggggagaggtggtacctaaagaaggaaaaagacgactatctgtgttaggccattcttgcattgctataaagaaatacctgagactgggtgatttatttaaaaaaaaaaaaaaaaagaggtttaattggctcacgattctgcaggctttacaggaagcatggtgctggcctctgctcagcttctaagaggtttcaggcaacttacaatcatgatggatggtgaagggggaccaggcacatcatgtggcaaaagcaagagcaagagagagagagggtgcggggaggggaagtaccacatatttctaaacaatcagatctcgtgagaactcactcactatggtaaagatagcaccatgccatgaaggatccacccccatgacccaaacaccccccgccaggccccacctccagcactggggatacaattcaacatgagattttggcagggacaagcatgcaaactatatcaccatctggtaacatcctatggctatggaagggaagggaataggcaaaattggtggttgaatttggttgacaaccaaaactcagtggacaacccctttttggtatcccagtggtagaagccacttggagaaggttgggaagctgaatcagcccaggatctgtgtggtcttcagccttccaggaagtagatcatgctggacaaaaacttcagacctcaacccacaggatctagaaaggccaggatggaagaagccacaaggaaaggagatacttagagctcagtggtgctggttagggagtctttaaggacacttgagagccagcacctgtgccctcatcctggcttcagattctgtggcctaagtgctaaagcctcccgcccactcctacagatgtgaatgagagtcagggaaaaactgggggtgggtatgggagtccgatgagagaagagcacatcaaacccagggtatctgtgagagggagctggatccatagggcctgctctgcatctgcaagtccagatgtaatggcaacacacttgggcagttaccatcgctacctatgtgcagaaggctacacaaacaggaagaggaaatattcaagcactggctcgttcattttaactcgagagtgtctaaaacagatccccaacagcacggaaagtttcagttttgtagtcaagcagataaagatgtggctaaggagagtattctaaggcagatgccaagtgtatgccctctgtgagtgcaatgtgcattgcccatgggcctagagcattctagaatagatatgcaaaatacatgaccacttagggaaagttgagatgagtcactctttctaagagtaaccgtttaaaacatcacacttagtatctctgagccccacagcacatgcactgtgaagaataaaaattcagataacatttagacttgcatgaacaattgttttttttaaatagacaccaaaggaaactcgaacccaaattctagattcagaatgcccaacactgcttaccagagacaatggattttggtttaggttttaaagagtgataagtatcagattcagatgctaagaggtaaaaggagaagacagttttgctgctcactcagtgggttttctcagttttagacaaaggtcacaagggatcttgggggctccagacactatcgagtaattggtaaaaaggatgatcatgatatcaaatacctggagtgctaatttctttagaaaccaaattatataagacctttgaggcatgtgaacgttcatccccagttcagaactgcctggaagaagcagagttgacattgttcatttttaaatactgtgcaagttctgctagatggctagcatcataatggggtaagagcagatcctgagtagatcttccctagcactccttagctgtttcccatgaaccttagagaatcaaagacctataggcttagtggatactaagagagatttgaagataaacatgccattaaggcaaagcccttctctgacctgacccaagcatgtcaggccagagacagtaagaaaaggcaccagaaaaggcattccatggataagagagaagccagggccctccacccttttgaacattttgaaaactgaaaagggaaggcctgtaagcagatgctcagggccttcatgatctctttcagccaggttcttgcactagtatcagctgatcaagtcctttccctcagtttaaaccatggactaccgtactgagggcttaggagctgtgctttctgacatagcaggaagatatcgggaaggtagctaaattctactggcagaagcttaaactatgtgagatctaatatcaatatcctgtttacagatcagagccattggcacataattaggcagtgagacaccaattctaggaggtgtgtatacaaggtggaggggtgatccacagaagcctcccctctgtgctctccagagccaagcaagacatgacagggaagtagagggtggtcgtttcggttatacagatgctgcacctcttgaaggagtcagaggcatgtgagattcccagggtcctaagggatctgagttcctttatgccagaaagcttgggctttccaaggtaaggccaatggtagctctcacttatgtggctccggtaaacctaactgctccagccaggagggacaagatggaagctcagcataggaggtggtcaaggaaagaaacctaggacctctgaggttgaactagactagtggtttttgtttttgtttttttcaagtaaatttgaatttggcattgagatgggcacaaattagaacagcttaaggatgtattattaaaatgagtgctgaaatattctctatgaagacactttcccccaagaatactgtggtatggttttgaagacctcataaggcttgggatggaacatagtatgtgaatgttgcaatgctttccaccttctggaaatctgtaactggagggcagaattctggtggagggttccacttgtaagtctcaccctaatagtgttggtggtactttaaataataaattgaaaaaaattatattaatttctctaaactgaaattatgaaacatatgtcaccatccatacctgtgagcattatccctgtgccttttccttgtctctcctggggatctcagagaggcctcccttgtttttcaaatgaatcatatagcagtttattccttgatctctagttccacagttcctctccccacttccctcagtatctttatttcccttcaaatttcactttacaggtctcttcatctgatcagtgagtttcttgccaaacatatttcaagaccttctggaagtaccttgccaataacccattgccacatcattattgctaactcttcattattctccatattctcttttcaatttcaaggataacaatatcaatcagtgtggacctaacctgtgcttcttaaagcctctctggactggggttttaaaaggatcacactaaacccttaattactcctcttttcttgtactcccttctctgctcttgtcctggaagagagatcatgacaagggatgatagctcatagtgaaggagccactccttggctggcaagaggctctcctaaaccactacaaacaattagtcttaatcctggctttcaaatagaagcacctggggagcttttaaaaaaatatggatgcctgggtcctatcccacaccaattaaatcaggaactcttgggatgaagccctagggttggtattttttaaaactgcagtgtgattctaatgtgcactcagtttcaaagcactgttaggagctgtggttagccatgatcctttgttgagcatctatttgcagccagatgtcagcccacacaatcagggcatagaggagtagcacaaggattctccaatcaagttattcaattctcccactcactgcttcttgcctgctttgcctcccccactctgagccagggctccttttattaaagcaactcctaagaacacagggacgctctctaccccttgcatgaactcctctgcaaatctcttaggagttagcacttcaatcactatcattcattcagaaaatgtaagtcaccttttttgctttgagttaatcatttcccattttcccaggtgattcagaaagccagtgctcactgacaatgagtgggtagacgcgtgggcctgcagacctgcctcgctgttccattaacagcagaacacacttcgagaggcaactgacaatggaggcaacaacaacaacaacaaaagcagtatttttccaatcataaaaaaagaagtctgtttctgaaaacacagtttgatttgtttatatttcatgcagtgttaaaatgctcagtcggttctaaccttgtttgcattaatcctcttttcggaatttgcacatttgttttcaaagcattgggttggagcagtttgctgctacatggaaatcatatcagcaatcgtactcagaacatgaaatgaacctgcacatagaacccacacaattttaatgtctgctaaccaactgataagcacataggaagggcatacaagaattagaatagagagccattgagccaacaaaggttcactttctaagaatcaccaccttctgaggttactggttagtactctcaacagccattgcagcagaggctaattcattcattcacacattcaagaaatttttccttggacatctactgtatgccaggtacgatgctatgagttaggactagactaaggaataaaacacagtctcagcccccagagtctacagtcttcagctaatcatataaacaaataatgagctttgcaaaagcttctcctctcattggtatgctcttctcccatctctttgtctggctaaattctattcaacctgctagatcttgagtaagatgtttctttatctaaaataagcgtccccaacccccaggccatggaccagcaccagtctgtgtcctattagaaaccaggctgcatggctgggtgcagtggctcacgcctataatcccagcactttgggaggctgagatgggtggatcacctgaggtcaggagtttgagaccagcctggcaaacatggtgaaaccccatctctactaaaaatacaaaaattagctgagcgtgatggcaggcacctgtaatcctagctacctgggaggctgaggcaggagaatcacttgaacccaggaggcagcagttgcagagattgtgccactgcactccagcctgggtgacaacagcaaaactccatctcaaaaaaaaaaaaaaaaaaaaaaacaagagaagaaaaaaaaccaggctgcacagcaggtgagcagcaggccagtgagcattaccacctgagctctgcctcctgtcagattagcagtggcattagattctcacaagaatgtgaaccctattgtgaactgtgcatgcgaggggtctaggttgcacgttccttatgagaatctaatgcctgatgatctgaggtgaaacagtttcatcctgaaaccatccctccccttgcccatcagtggaaaaattgtcttccacaaaactggcccctggtgccaaaaaagttggggattgctaatctagaaaatgctccttgacacctcaagttagagttaggcgtcctttctaggtatttccatagcaacagtgcttactcctatctgaggactttgcacttcgtattgcaattacttgtttaattatttatatcctctcactaggcaatgagctacttaaggacaagagctatgtcatgtccatctttatatccccaatgactagcactatgcctagcacctattaggaactcaatagataattgttgaatgaataagtgaatgagtgattgaggtattcatagggtattataagaacacagagaagagacacctaaagatacttcctgggagaggtagcttctaggggaagttataaatggttaagtctgaattatccaggattaggctggttggacagtagagagagacattccaagcagaaggatagcatgagaaaaagaaagccacaaaaaacaaaagaggcatgccagaaaatgcccagcaacacgtggagaggacacacgctaaggcagccgtaaggtcatgagggatggaaggttccaaccaaaccagactcaaactccattcttcccttcgttcccatccaaataaaagaatgaacacacagatcagaggagtcctaggagctgatctccagggtttacatactggttaccaacatattacatagtccctaagtcacaaaccatgccaaaaactcttccttgatacaagaactatgtcttaccctgccctgtgaggttcagtgaatgggaccttccagggaaaaggtgccaggtcatcttcttaatacactccttgcagaaggtttctgtctctcattacaaatggtggtaaaacaccttgttcgctttggtaggcccacctttcctctgcccagcttcttcctaaaacctagctccttttgttcaacctgagcaacccttaggagagcatgttgccttatttctccttactccattgttttttgtcttgttttttgagatggagtctcgctctgtcacccaggctggagtttagtggcacaatctcagctcactgcaacctctgcctcccgggttcaagtgatcctcctgcctcagcctcctgagtagctgggactataggcatgcgccaccatgcctggctaatttttgtattttttagtagagatggggttttaccatattggttggcctcgaactcctgacctcgtgatccacccccaccccaccccacctcccaaagtgctgggatcacaggtgtgagccaccgcacccagcccattgtcttttaaaatattaatttcagtgatttcgtcatttacattcaatgcaaccaatatcctatttaaggtaattccagagtttcagtaaaacatctctgattacccacttcaagtaagaaattctaagaagatcagctgatagagttcagtcattaattcattcaacaactatttaacacatctgtgtcaagcactgtgctggagtctggaaattcaaagatgaatgagaaatggtctctactcttaaactgtctgcagtgtggaggaagttctaggatggggaaattgcttatgtggggcagtgctgaggctactgctgacctacctaagccagcacttcaggtttatgcaggtccctgaatcagcaatacaagcatcacctggaaacttgttagaaatgcacattcttgggctcttcgtacaaacctactgaatcagaataagagagtgaggcccagccacctaggttttaacaggacctcccaggaatgctgaggctcactttggtttgggaatctctggtctaagctctgttctgaatcacaccaggcctatatggaaggtgattagccattcccagccttcttctctacaatccccccttcttcttttaggagattaacatgaaacatcaatccagagtgactacccaaaatgaagtaaaaatactattttctcacataatagcaacacatgacactgctcccaaatcacagagacggttttatgaagatcagtatggtatggactaaaccgactagagccacatcagcatcaacacagagggattcagaaaggataatatcatcattgtctcctgtattagtctgttctcacattgctatgaagacacacccgggactgagtaacttatgaagaaaaaaggtttaattgacccacagttccacatggctgggaggcctctggaaacttacaattgtggcagaatgcaaaggagaagcaaggtacctcttgcatggcagcaggaaaaagagccgcaggggaaactgccgcttgtaaaccatcagatctcgcgagccctccctcactatcacgagaacagcatgggggaaaccgtcctcatgatcctcccaatagcccccaatcacctcccatcaggaccctccctccacacgtggggattacaattcaagatgagattcaggtggggacacaaagccaaaccatatcatcttcattctcccccctggcacttgaggggaaaaaagaatcatatcagcttgactattcaaaaaagaagcaagagcgccacagttatttcagtgcatgggaaaagggataaactgaaacaataaacttgaacgtttaggaatataaaggtaagggggagagagataacaatcttggcctctgagttctgcaaccctatggttgttttaaacaaatgaaagcagattgctttcttcctggagttctagtgaaatgtatcttgccaccagcagaccgttcggagctcctggccacagtttattggctcattgccacgtgtcattagtgacctattttcgctgctgtgaaatcggccatgtctgaaggcccccgaatcagcagtttctccctccactcaccggctccaggctggcaaagctgacaccagtgccacagaaaatgcaacccgctgccctctccccaaaatgtggggagagcacggttttgctatgaagatgtcggctttgacctgaggctgacttgagagcccagctgtcatgtctcttccaaataagctgctgaacttggaattatcttggctgaataattaatcaggactaaaaataacctcaaactgcctgggctttgcttaaatcctacacaggtgagagaagtaggttttttttttaacgtaattgcaaaacccatattttgaaaggctctgcaccaaaatatgaaaataattacccaacatgccaatttgggagataattcacagttaatctggctctcttaaaaaaatgccaccttttgaatttcacattgacttcagattgtcagttcttggtggatatgaaaagcagccgagagttgtactcaaaattttctaagaataccttcaaacacaaatccatggggaaaaatatatccgttggtataaagagcgcctgttaccaggcagattagacagtgagccgagttccacaagagggcgccttccccatgcttccttctcgaaggtgagggcgctgcgtttccgccccagccttggctgccctttcttttcctttgcccttatacaaacgatgtgctcccaagagcgaatgctcagtgtcctgtggaatgctactcctgtgaccactttctagctgagatcatcaggcaaatgttatctctgtaacatcagaggagcaacttcaaatgatgagaaatcaagcaaaacattaaaaatacagggggaaaaaacaaatacatctaaactgccttctctccatggtgatctagctttgtgtgttcattttcttgatattgctgtgatacaaataggatgtgatgaaatgaaagtacatccatcacagcaatcttgtgtccagcctgaatctcagacccagatgtggctccaaccaacaagtgaccatgagcacggggcccaggtgtattctgggaagctgctcaccctcactgccatttctttcatccccgtaggcacagcatcaccttacatcgaagacagattcaacgaatctgcctctcatcctaggtggccactaggcaactcctctgggaccatttcttcctgctctatgctcccatgaccttcattcatactccctcttcccctgctggaaacctacttcttttacctcctcaaaggtaaaaggaccagctggtgaacaaaagaatacatttgctctatctaaagagaagcattagagcaagggaggaaaaactgatgcaagacaaatgacttgggctcatcataaaatactgagcagtcagcagaacattaagaagagacttctactccccaccacacacataaccatctgcacacctgaatgccgagactaagcctcaccagacgccagcagcataaatgagaggagtcacttacccctctgaggctcaggcttctcgactggaaaaaaaaaaagataataaaaatatcagttcagttgggcatagtggctcatgtctgtaatcccagcactttgggaggccaaggcgggtggatcacctgaggtcaggagttcaagaccagcatggccaacatggtgaaaccttgtctctattaaaaatacaaaaattagctgggcatggtggtgcatacctgtagtaccagctactcaagaggctgaggcaggagaatcacttgagcccaagaggtggaggttgcagtgagctgagatcattccactgcactccggcctgggcaacagagcaagactccctctcaaaaacaaacaaacaaaaaaaacctaatgaattgtcagtctcaagccagtgggtagccagtgggtaacctggtaatgtaatggttctgtgaaagagagggtccatagaatacaacaaatgtgtgatcttgttacttcatttgctgtgatgtgagctgaataagagtcacaaagaataagagaagagctgtggttgttgtacagaaataaatactattcatcttgaaactttcacctcatccccagaagtatccaatagaatttattaatgcgtatttcctacccagtgtagtcaatcaatgtgtaataaaaatgctgatggccacagcttaaattattaaaattctagcaggtttaccaggtcctgagcttagaaatgcatgcaaatctcttcatttgaatagttgacttaatatcattagttcccccctatatcctctggttagagctcacctctaatgaagcctcaggagctgatgatattcccatacagtcttgttagttttagagagaaaactctccccacaaccacaaaagtcttctcctaagcccttaacctagaggtgtcacaaagagcatgaggcatcatcactcctgggacaatgaccctaaatccttgtcccactgagatagtagccttatcttcctgtcaataggaaacccttggtcatttgttgtgggccaagaggaacctgtggccagaggacgttaggaggaaaacctggtttggcaaaaatgatgcagaacagggacttgccaaatagtaagggtaaaaagaagatgacttctaactggctatgtggctgaaagtcaccgaaatgggcagttccaccttgtggcctttggctctccagaggcaggaatgaggataaaaaggtagtggaaatacctagaagatgagacctgagaccagcagaggcagagaggtctttctggttttctatgggagagtagcattcttcatttctctcctctgtgctccctgtgacttctgtttaacttctgtcaaagtagttgtgacgccacatcactctttcttatttgtctatgtccctcagtaaacttcaagctccacgtgggccagaaccaggtttaatttgttcataatggtgaataaacttgtatcccttgaactgattacagcccaagctcaaaaatgtcttaaatgagtaaatgaatgctgcatacaaaggttagccctgaaggagaaatgagcaacatattctaatggagatgtatgtggcacagaacttggagatcaaagtcagcctcttgggtagacttcagggatgggctttaaacaaagaggcaggaagatccatagcattacttgggggatgaataagactctagaattgagttggcccagaaattttgggtacaagcaacactcactttgtttgatatgattacagagtattttcttctgtttactactttctttaatttaattatgtgataaaaagtgatcactgtgtgtattagtctattttcatactgctataaagaactacctgagactgagtaatttatgaagaaaaagctttaactgattcacagttccacatggttggggaggcctcaggaaacttacaattatggcagaagatgaagggaaagcaaggcacatcttacatggcagaaggcaagagagagagtagaggaaaataccacttttaaaccatcagatctcgtgagaactccttcactttcacgagtaaagcaagggggagaccgcccccgtgatccaaacaccttccaccaggttcctcccccaacacgtggggattacaattcgagatgagatttgggtggggacagaatcaaaccacagcactgtgtatttcaactacttccagagatgatgggcacataaggagtaaagaatagagggggggacaatttcctccacgtgtctggaagaactttcacaaaaacatactcatgggtcgttctactccaagaagacggatagctcttaacacatagtaaataacttttctatctgaagtctgcttctctttctccaatgtaattgatttgtaaaggggttttgccccaccccccactctccttgattaagttcatccgtgaacaccaggaggctggtctgctcacccctacacaggtgtcctttctattttgttttttgagacgaagtctcagctcactgcaacctccgcctcccgagttcaagtgattctcccacttcagcctccccagtagctgggattacaggtgcacaccaccatgcctggctaatttttttgtatttttagtagaaacaggatttcgccatgttggccaggctggtctcgaactcctgacctcaggtgatccacctgccttggcctcccaaagtgctgggattacaggcatgagccaccatacccggcccaggtatcctttcttagatgggcattacatcagtcccactatcagtccccaaactaaggtcagtgtcttaagacttgaaagtcaatatgactattagtactacttaaggggaataattgtgtgctacttttggcttcagtaagtattgtaggcatatcacagcaaaggctttagaggcttagagagaaatcgagataattgagcaaaggtggtgacttaaaaccagctctacaatctgtgttattctcttcgctggagagaaccctgcaaaaaggggcagttaggagtgaagcagatagcctatgttcttgaacctgtgagcactcactggtgacatggtttggagagtagaaaactggcctatgcgtctggacacccagccgctgtcaacttcagcaaagcaaagtttggcttcccagcaagctaaggaggccttttcgcccttgcacttgatgttcccttaacacggaatgctctgtcccagacctgtctatggctggctcctccttcttctcgggtctaatctcaaatgcgacttccccagagaggccttcccagatagtcccctccctggtcattctctatcatgtcgttgtatttcactcatggcactcatcaccatccaaagctgtctttccatgtacttgtttatttgattattcactgtgtccttttgctccatagatagataagattcataaaagcagggcccctgactctcttgtttgctactttattacaagcacttcaaataatgtctggcacatagtaggacctctatcactgtgtactggatgtacgaacaaatgaatgaatgaatgagtagcctgaatatggggctcaagatggcagtgagaaaagtgctgtcccatcatgaatagggtaggttttatctcctgaagaggatatgtgcattttctaaaggaaaggaggtagggaacaaggaagatatctgtatcatcggaaaagatcttttattcccatattgaagcaccaacacgtcctccccaacatgcatttctgcatgtgggtgacatgccagaaggcaggcagggaggggcaggcattaaagaactaacaaactcaccaagttatcactgtggttttaaagtggggtgattaaaaaaaacaaatgttggtgaggatgtggagaaaaggaaatcctagtgtgctgttggtaggaatgtaaactggtatagcccttatggaaaattggatggaggtttctcaaaaatctaaaaatagaaccaccatatgatcaggaaatgaaattggtaactcaaagagatatctgcactcccatgttcattgtggcattatctacaataaccaagataccgaatcaacctaagtgtccaaaacagatgaatggataaagaaaatgtggtatttatacacagcggaatttgatttagcttttaaaaagaaggaaaccctgtcatttatgacaacatggacggacctggaagacattatttatttaaatgaaacaagccaaactcagaaagaaaaatactgtataattgcacttatatgtggaatctaaaaatagtcacactcatagaagcagagacatagtggttaccacgggctggggggagggagacatgcggaggtgttggtcaaaggatatacaatttcagttatgaaagatgaataagttctggagatctactctgcaacatagtgcctacagctaacaatatggtattgtatacttgaaattttctaagagagtagatcttatattgagtgttcttaccacaatataataataataacaaacggatgggagggaactttgagagatgattatttatgtctacaggtttgatggttttatgagtggacacttatccccagactcactgagttgtttacattaaatatgtacatgttttacatgttaatcataccacaataaaatgtaatagattagacagatagatagataagcagggtgcttacatacagctcacaaaaggcagagaatggctttgtcttgccgtttgagtgcagtgagagaatataattaaagtgaccaaaaatccctgggaatttattcaattcttttgaacaatgaccatccttgggaagggaagtcccatccatatcaggaaggggacaccagcaagcttaatcatcttgcatttaaatgttttccatctatacttagagctcaacacacaatacaaacacagccttcaacactgggaccctctccacccacagcacgtgccctctgacctgctctccaagcagtggtggtggcctgcctctgtccagaagcacacctgccacggcccagttctctctcagtatgtttggtagaaggattaagggtgtccatcatggttgctaaacagtaccaagctagtgtcctattataaaattactttcacacatataggatgcaatggttctaatgaggggaaaggcatgctaagaacaattacccccccttagattagcttagtactttatatggttaacaaatctcttttaccaaaatcatctcattttaatttcagtcctcatcactgaaattcatgtaaaaaaagagcaggtgtttttccatcatcgttttgtagaggaggaatctaaggtcaaaacaggtgaatgacttgttcctggtcacagaactgggaggacccaggtctccttgtctccaaatacactattaaaagtcaaggtaatggggaaagatccatggctgacaccctccttgttacaactgaattgcccatatgtaaagctttctgcagatacagaataacttattttataattttattgtgttgttggatcaggatcaaaggccggacaagcttatcactggaggcaattattgaatgatgaaaagaaggaaggaggcaaagaagaaacgaagtaagaaaagtcttcctttttaagggatcaggctggctacacagcacatccatatcctgtatatgagaatgagagcagaatagggaccactacaattgactgtcacccagtaagtactatgagcatagcagtttggaactgacatgggccttggagatcataataagctgtgcggttttgcttgctaagttactcatgcccactgccacatcagctgatctgaactcacattcccatacacaaacattgaaaacaaatactttctggactaaaaataaagtacacataaaagtctgtttaagtgaatcatccttccttgggaagctaaaaatgggtgggaggggagcaatctgtaggctgcagatgggatgggtggcagtgtggacagagtctctctttgatcctctgagaattccccagttgaaaatgctgtggggagatgaatccttctctcagaatacaggctgcatctgaccttcctcctttgagtgttagcttctgctcacacactctgtctctctgtctctctctcattctctctctgtctctctgtctctgcctctctctctctctgcctgtaaataacttattctgtaatagaattgtggctgagataggggaggctggaaagtcccagcctggggttacgcaaggaactttattatttccagtaatgttaggagttggctaaatggtctgtgaaagagacttgtcccttttcctcctgccttccatcacatgttcattcatttattcccgcattaatttattgtgtaaacattcactgatagtttctgtaggtacacatatgaataagaaagggtccctactgtccagaagctctactcttatcatttccagtaatgttaggagttggctaattggtctgcaaaagagccttattccttttcctcctggcttccatcacatgttcattcatttattcccgcattaatttattgtgtaaacattcattgataggttccgtaggtacacacatgaataaagagtccctactgtccagaagctctactccagtgaaaaggagcagcctttgggagagatgcaggaaatgaggctgaagggtgtttgagaaagggcagaatggcctcatatgccactctgaggaatttgtgcttgattctactggtcaggtaaggatttcccagactttggtatggaaaactgtatggatcagttttttaaaagaatttaattaaatattcttggtattgacaactcatttttactacattatttaaatatatacaaacataaagcatgttaaaaaaaacttcagatgaattaaatttaacagtgtttaactgagcaataagcaatttgtgaatcaggcagccctcggaagcagaagaggttcagagatctcggtccacaaggttggacaggcagccttatggacaggaaacagaagtgagatacagaaacagcttgattggttacagctcagtggttgctttatttgcacatggtctgatcagttggtagcctgtgattggctgagactttactcctagttaggctttcagtttgtgtgtgtactaagttaggttgtagtttgttacctaggcactcaaggtagggaggcattctcagaccaaatttagtttaaccatggggtataacttcccagtgtgtataccttatgcaattataaatccaaaagaattataatgtaaaaccaattaaatgcaaattaacaaaattcatttaatgcaacgaatattactgaaacaaaatgtctgctgcctaggaatgtggtactgactgtaagcatgtggaatattttcagttcaggttgtctccgtgacgtgctgagcaatgactcagtaatgtcactcctccctagtcatactagcttggaaccaaccattcaaagaggctgtggtgatgtcacatggccagcacttcccttgtctatatgtttggttctggggtaattctttttttttctgtcacccaggctggagtgcagtggagcaatctcagctcacttcaacctccatctcctgggttcaagcgattcttgtgcctcagcctcccgagtagctgggactagagacacaagccaccatgctcggataatttttatatttttaatagagacaggtttcaccatgttggccaggctggtctcaaactcctgacctcaggtgatccacccaccttggcctcccaaagtgctgggattacaggcatgagctaccatgcccagcctgtcttcagggtaattttaaatgcaaaggcagttgtaaagacaaatcaactggcagcatttagttatacaaacagtcatccaatgatctagaagatgcatctatttaaattttaaactgtccttgaaattaaagtattttttttttaatttctgatgataccttcagtcccaagagtacatcactgaagcccttagcatgcagtttgaggaaatattatgtaagtgctagggtcctgcaacagacagattttgggcaaggaagtgacatgatcagattttcatattagagcaattacacaaggggcggtatgatggatagagtaaaggagagaaaaactcagagtaaggaggccacttgggagacaactacaataatttaggcaaaggatgatgaatgatctaaacaaagtcagtgtgagtgatgaggcataagagaatagactagaaacgttggtaaaaggcagaatctgtagaacttagggactgattaaatgtggcaggtgaaggagaaggggtatttcaaccttaggcaacactattaaccctagatgggaatataaggaaagcaagtttaatttcagatatggtgacttgggggtggggaagctgtgaactattggggtgaggccagtcaaatacagtgggctagaactgcagagaaaaagcttctatgtgaggctagcgtgctagcatggctgagtagacaccagcctacagagtgtaatttctagggccaagaaactctcatcacccctgcccccccacccccaccaaataaaatgtttctcctacctacaggtcactactactcctatcatctaacttaatgctctgatactttttttcttttggagacagagtctctgttgcccaggttggagtgcaggggcacaaaatcatagctcactgcaacctcaaattcctggactcaagtgattctcctacctcagcctcccgagtggctgggactacaggtgtacaccactctgaccggctaatttttttgtaaatttttgttttgcagagacgtggtctctctatattgaccaggctagtcatgaactcctggcctcaagcaatcctcccaccttagcctcctggagtgctgaggtttcaggtgagagccatatcaaaagagagtgacacttaccctgggattgatgttctggatccagaaatgctccggtggaaacaatgtggaatttgcactcattcagatcataatttagatttctgccctgacacttactaggtatgaaatcctagcaaatcatttatcctctctatcttgcttgtaaaatgaggttttaaaacctttatcaaaagctagttaggaatgttaagtaatataacacattacagtatctagcacagtgcttgcaacatcttggccaactaatcacgttcattctcaaatataatggttaagtacatggaagaaaccagacttcctgggttcaaatcatgtctctacaaccttctacatgaccttacgtaagtaaactaacctctctgtgtcataaggagataatgatattctgtaatgcatagagttattggagcaatttgtgagtcaatgcacatgaaactcagaatcgtttgtcttgcccatggtatgtgctatctaagtgttagctgctattgttgtcataattactccttcctcccttccaatgactatgcttcagattctttcctggtcatcgttttaatggaaggagagaaagatcatggcatgctgggcacctaagccactgagtgtgaaactccatacgagagggaaaagggggagtttgatggccctaaaggcattctttgactgcttcttaattttgtctaagacaaatcagggtctgcactgcctcagggagggaaacatagagtgactgaagtccaaagccttgtgataaaatggaaagactgtcatcggatgtctggccaagaaggcagctgtccagatgcagggactgtgagttcttatgaactatgacaacactcactttcaatgaactttatttttcacttatcagtggttaaatgccaaaattacattggattttgcaccaaactgggaagggagggggaacaaaaaaacagctcaaactgacttgcatttcccgagggctgagtcctgagaagttacagctggggaagccggatcaggcgcatgggccagtgagcaaacacagatttttctgatatattaagcattattatgtcaagtacctgaccctaatcaaccaaggtcatgaacaaactagtccttttaacatttttatgaaagaaactgctgtgtgcttttctctctggactctctcacttggaacacagatgtgacccggctcttccaagacttccctcacggaggcattaggccgatgccctgagctgagtttttggtgatttgctgcctccactaggatcggcgaagaatattttaaaataaatttcaatttgtttgatcctgagaggatgcaatgacttttagctcaaagtgggacagagaggcctattagagatggacacataattttgagggggtaaaaattttagctcattaaacttttcccaaattaaaaagcacagagaggagtggagtggaaagagcttcatctttgtggtaagatagattttagatccaattccaggtctgtcccctgcactgtttgattcagggcaagtcacttaaccccctgagctcactggcgttagctataaaataatgacagcactacctacctcctaggctgccataaaacccattacgatctgaccctgatggtttctctccagcctcaactgtagcctctccctcctgaacaggcctccctttaaataccacttcctctaggaagtcttcttggatatcacttctcccagttaaagtctaggttgtgtaccctcctatgagcccagagcacctgtgtgtatcccatcaataaacttagaaaccatcatgttgatgttccagatcacccctggactataaactgttcaaaacaagatcaggctcttctaattgcaggtgtctccagagcttaatgcaaggccagacacacatgaagccttctatatgcttttgtaaaatgaatgaagactggtaaacattgctattctgttgctatttatatggtcctcagatgaaagttactccatacgaagtctgacatactaaagcattctccaggatgcttttctgagttgccatgcctgattcttgatgttgttctcaccaccagactaccccctttattctttattctagactccacttgcccttgaagctgagactactggctttcctcactgcctacctaagacacctcagccaggattccaaacaaagttcaatgtctgcactctccttgcccttgcagatctagcagggccccctcaattctgtctctgccaaatcccattcaataggatacacaaaattcactctgacttgctgtctttgaaagcatgaaggacgtgacagtctcattggtctttactgaagaaagatctaacccaagcatcctcttctcctactgcccaggtatgggtcagattctttaagaatatattgggaagggggagatttatttcacattacttctctgaattggaacttgctctgagcaccctgttgttctcctttctacttccgtaggcctctcctccattgatcactatccagaactcccagacaatccccttagatggatacttctcccttttcaaggattcagacaagaggttgatgtggtactggctatacttcaatcaagtgcccagacccttcattctccatagcatcaccacagaggagcaaaaggcatgggtctcgtctgaacaaccagggtaactcaaggagccaacaccacattttcttcttatggaacttaaatctgtacacatcacctaaaggaaaattatccaaaaaggtagactttcctcatggggtttccatcatggacacaagcttgttcctacacagtgtctcacatctccaaaacaatgtgttcttcccactctgcagagtggcaaaaacaagatttgatacccaactcactactcagacttgatcttgaccttggagccattccttccctaggggtacatttccttaattatgcatcattcagactaaggaaattcagaggagcttcatcaggaagtcagcaatgggggaacatctctattcctcagtgcagtccagccttatggtagaggagtgcagtggcccaaagaaggaattctgaaatgaagcaaccaggacttgaagatgtcttctcccagctttgtgacctcctcatgttacttcctgcacctcagtctccttttctgtgatatggtgatgattatagtgaggctttaaagagttaacacacatatagagcacaccttagcaaagatgtgctccataaattttatatatagttttccgccagtgtagacatggctattatttttctgtttatctagcaaataatcgttgaagcagatatatacacattcacagacacctcctgagggcaaacactaatttccagagacagtaaaatctggaaatatttttctaaatgactcatgaggaagtctcaaagtgcagtcaacacagcaagctcactcctgatgaactttcaacctacacattttcattaggtgcaaatgggattttcctgctctctctgcattttggctgaagcccctaaagtgaaaacaataagtagcaagcacctctatccccaatcctacagagacctgctggatcccagggctcactagaaggtgcccaaactgatctttcacctccagagtatgtaaaggaagacttgaaagtccccaagagagctcgttgaagggaatgcctgagaatcgagatcccttggcttttctctcccactggagaacttgacatgtgtccttgaagacttgaggacatagttgaacagagaccacagcctgcctcatgttgagacaatttctgaggtcaggaacctgccaagaactgccaagagggcaggcgaggacagaggcagcaggggaagcagccttattttccttggtggggtagagcaggaatgcaggggttcctgcaagcctggtggacaccatggaatctatcctgaaacatcttgaaaggagcccaccttatagggtggcctgccagagcaaggagatattagcagtgagaagctggagtacaaccgctaagacaggagttggggtggaagaaggaaagtgggacgcatggggtcggctgaagagcatgcaccaatagcagtaaactagtacatcagaaaagtcccaatgcataggatccacaaatgcacatcatggaaaagtgtaatgaagggcccagcatctgggcaaagccagccaagacagagccacaaagagcaccagatactttaaaaaggctgcccatcttctgtttccctttctgccccactcccctaccatggagaaaccaaaagcagcaaggcaaatcggggaggaggagtgagtcaggaacaagtgaaaaaacagaccatgagaccagactctcctttcctattttgggaaccccagcaagggtcaggcccgggctgtgaaaatgagagaagatgtgaagagacaaaggctttgatttagactctattgggtcttttcgtacttatagatgagtcataatcctcaataaaagactcatttttgttgcttgaacatgatcagactacagacgcagacagggagggaaggttgagcacagtatatttccaaggttgtcatggcagagaaaatgaagtagtttcctgttcatagctattgggctcaatatatgcacaatacattggttaagcaacacacatgccaaagcaaaatctcatcagccccatcccccaccgacagaggggtctgagctgctgattctgtgagtatggtacaaactaacctaatcctcagcagacaggtctttgcccttaagattgttatgaggaactctgaaagtttctttcttataccccttttcctccagcctgctgggcagaggagaaagtgcccatcaatcaatctttaggtccacagagatctaccctaaggattgagatcactgctcttaatgacattactagattgggaggcaaagttctctgtctgccccagtttctttctacagagagagaagggactcttccagtcacagggacattggatatttaatgttgggtagagaaagagggacccaatttagttgggaaagaaagtaatttaagatcttccccaagaaatataaaactttctctgagaagcaaatttagagattcaaatgactccaaagaggactcaagaatggaaagaaatgatcctccctttctcaaaacactcataatcataatcgtaatcataaccatatcattccagcaaatttcaagatctcagcaaggtggttaggcatgccccttttcctccctctttcttattttctactcttttctcttcgccccaggacaaagtcaagtcatttttcatacttttttcaccttgctatttattccattactctttgaaagcaagtccctgggtcaaccacgtcttcctttcacaatgactcgggaaaacaatgacaaattccatgtggaaaccagagagccgagaggaaagtgctggccattttcttccagttctccactctcctgaaaaaagcttatggcttggtagaaattgtgaattctcttgaaataaccagaaaaagcacagctggaatagcaatatctaaacaaaaatgcagctgatctgctaatattaactagtctaaaagtaccatgaagcatgtggttttcattacagcaacaaagccactatagtatgacaagcagcctgccttccaaggttaccctcatttacatgatattgtattacacatggagttggactcttgggtttaaagaaaaacaagagtttcacagcaagaggtgaaatgaagatttaggcactcagccaaaggtttgagactacccagaaatgatctgagctcacagtcatgtgattcctctctgctcagtactccagcagcgtgccatttagtctccactcaggtggaactctcacacatggctcttatcacaggtaattgtgtacaagatcagggcgtctcttgatcaaaaccacatcccaaatagcacctaccacaggtctttaccatcaactgagctcgcgatcagcaagacgatgtagttggaaagggcagactttggagtcccagagctgagttgcaagcccagcctctgttcctttaatgctgtttaatcttaggcaagttttccacttctccaagcctcagtttgctaatctgtaaaaaggttatagggaggattattactgctatcatattcacagctaacatttatgggcatgcttataatattccagggacttcatgttgttacacgcattattctatttaatccccaaaataatttgatgaggaaactactaatattttctccatttacagataaggatactgagggtcaaagaagctaagcagcttgccaaagctacctgatgagtaagtggctgagctggggtttgaccctgggtgtgactcctgtcaaggcctgtgttctcactctctagataaagtcaacactacaacatgactataacatgcaaatagcaaaatggttaaaggcaagagtttctaccacttccttgttggcccctatctggactttggtttccttgtctgtaaaatgagagtagtaacagttcctacctcataggatggctataaaaattaaataacttaatatgcatatgacctatggagtaatactcagcacatagtagttactctgcaaatgtttaccactttgtatgtattactataaaacagctgacacatagatgatgagaaatgtgggaattaaaataagaaacagaagagcatgagaggccaccaaacgaccaacagctctgtgggcacctgcaaaaccctcgtgggaaacttgcagagatgaccagagacactttctggggtgctgacttcctttgatgcagaggaagggatctcagacattaagatctgaccatattttacacgcctgttttacatctgtagctggtaaaaccaggaaacaactggataagaaatgtaatgctaaacagatggataccttaggaccaaagagtcaggctagggcagtcccctagtggccttgtccaggcccaggcacaccctggaagcatcacttttgtctgatgatgtcactacacaaagtcacatggtgaccctgaggcagacaagccagttggtgcacaggaatggagctgacatgccttgttcttcaaccccctgaagcattttcagatcatacctatttcagaaggctggaagtgaacccagcaagaggcttctgtgttgataagtctttgtatcaaaattgacctgactgggaatttcttagcaaacttttcaaacaagagaaggacattctcttagatatgtgatgtgagtgaggattaaatgacctgatagaaaatgtaaactacttttaaataatttatggagttgctgtcatcattaaaaccacagagatttatcaactctcatttccgagtaagatttgaaggaatagatttgtagtcttgagatgggacagggcaccaagaatgaatacttacgattcaaagccacaaacaactttgtctcagatggtgttcctagattttgcttccaagtgtaaatttctggctatagcaaagatggtagcaagtaagtgatcatttcacctctttccaaactccctacttttttgcacatgtcagatgcaacctcaggtttataactttaattttaatatccatctcaagctaacccagtttcctggaaataaatgcctacaaaaagaaaaaaaacttttaaagaaaaatacaatgaggctgcttgtgggaagggatctcttcctcaagaagcaatatgcagaaattaccaaaaaagatggaaaaaacatgaatttaaaatctgaccatattgagtcttgtttccttactcagtgattttcaaaatatagccttattttcacaatactataaaagtaatgctgattagttactaaaatctggatatgatatagactttaatgtaccaaggagatgacaaaatcttattttaaaggctgttgatgattgcttctcagccttttggctaagatcaaatgtaaaagctgttgatgaaatttttcctaagaggaaagtgttttttccttagcaaaatgctttgaagagccatttggctgtaaaaaaataaaataaaataggttctgaaatattgttcagaaggaaaaccaggaaaccagtagtaactttgtttctctgcataatgatgcaagaagaaaaaaataagtttctaagggcagactgagatggtggggacataagttggtggaggaaatagggaggtaaagagagaaggcaggaggaccaggttcaggaaaatggaatctggaggcccaggagaagagagctcaagagaaattctcacttatgaaaagggctggggatatctgcatttagaaatcaatggtgatatcccatatttagttttaaagaatttgctatgctctgcagcaatgcaatctccctgttttcaaaaactctttgtaaaaattaactacacacaaatgctttctataaaggcatttagggaagataaaggaaaagaagcaactgtgtttcagttttgagaaaagaaaaccacctgaggatgagaagtgagattaagaatttaccaaaatcagagaacctaggagaaagttaccacatcccaccctaccctgcccctgagaacttccacagaaaatgaatagcctctgggaggccgaggcgggtggatcatgaggtcaagagatcgagatcatcctggccaacatggtgaaaccccatctctgctaaaaatacaaaaattagctgggcatggtggcgcatgcctgtagtcccagctactctggaggctgaggcaggagaatagcttgaacccgggaggcgaagattgcaagtgagctgagatcgtgccactgcactccagcctgggcaacagagcgagagtccgtctcaaaaaaaaaaaaaaagaaagaaaagaaaagaaagaaagaaaaaagaaaaaaatgaatagcaaagtatcctgagtttccttttacatatggaagccatttttatttgaatactaatagttggaatgatcaatgaggctggcagaattggggaacactgagaaaggagacatctggattacattaaataagtgtaatctcccctgatgcaaaaatctttcttatcaaagcaaggttaggtagcatcaccacctttcctgaagctggtgccattatcaaaatagtctagtaatcattaagaaagcagctggtgaaattcaaatatagcttttatggctagaaaaatagttttatctcaaaagtgattactcaggatgcagctgtgagagcatgatttccttctttatgtacagagaaaaatttcctatgagcttttgcagtggcgatggaaagaggaatgaatccacaagtcctgaaagtcttcaagtttttgacaagatgtgattttaagggtgtggggggctgagttgctctttatacccacctctatactctggaagtcatgccatttgaagtcagtgggttttaaagattcaggaaacactactcaaagtatctggctacagggctcaacttgctgagagagagtattcctttccttaagatttctacacatgtgatgcagaaattgttacacaaagttctgaccatacctgtgtatcattgttcagccacagtctcttatagaaaattgtaatgaattgcttttcaatatgcacctgcagcaagctctgagacaatcctccaggaagccttccttaatcctccccagtaagaagtagggtccctcctgtgcttgaaataattatacagatgactagataagaggcttggtgaaataagcttctcatatgcacatctcgctggtgcaaaaagtacttgcagttttggaccgtgaattgtaagtcgttataactaggctcaaacatgtctttaaccaaaaaaggaatcattacaatcaataaatttctgccagtgagaaatacgtttattcctgtagcctaaaaatccatgcttcaggatttgacaaacttttggagagcattttctgcatcctgctggttgtggaagcattttccctgcaaaaagttgttgagatgcttgaagaagtggtagttttgaagtgtcatcttctcttattctatgcaacaacaatgaaccatttcttgattggattgtgatgtgcgaggaaaagtggattttatatgacaaccggcgatgaccagctcagtgtttggaccgagaagaagctccaaagctacttctcagcgagaggtcaggtgaacatgggagatgaggcaaaacttcgtagcccaatttgttcaacttctgaagcgtgggttgtgatgtgcagtcggacattgtggtggagaagaattgggcccttcctgttgaccaaagccagctgcaggcattgcagtttttggtgcatctcattggtttgctgagcatacttctcaggtgtaatggtttcccagggattcagaaagctgcagtggatcagaccagcagcagcccaccaagcagtgaccaggaccttttttggtgcaagtttggctttgggaagtgttttggagcttcttctcggtccaaccactgagctggtcatcgccagttgtcatataaaatccacttttcctcgcacatcacaatccaatcaagaaatggttcattgttgttgcatagaataagagaagatgacacttcaaaacgacaatttttaaaaaaattttcggtgagctcatgaggcacccacttatcaggtttttcacctttccaatttgcttcaaatgctgaatgaccatagaatgtttcagggggtgtggcttcttagtgtccccagtatttcatggaaggcctactcaggttggtggtattggtgtttacttgtccggagtgagatctgttaaaaaaacaaacaggcatattaaaatattaagagtgtatttgaggagacagcaattcacgcatagggcagctccaagccagaagtggtcagggccctgccaaagaagtgaaagagaaaagcattatagggtgaatgcgaaagtgaggcaaagaaaatattaagttggttcagatcagatattgccttatttggattttctcagcagaaagtccctggtaatataatgctcagttggcttgtgacgggctgagctgaagtttcaatttgtttacataggaatgcagggtgatagagccatcccagcctaatgacctctcattaagttagtttaacaagtcccacaaggttatggtgagtttgtcagagatgtttgaaccagagcagctccatcttgaataggggctgtgtaaaatgaggctgagacctgatgggctgcattcccaagaggttaaggcattctaagtcacagaatgagataagaggttggcacaagatacaggcataaaaaccttgttgataaaacaggttgcagtaaagaagccagttaaaactcacgaaaaccaagaaggtgaggagagtgatctctggtcgatctcactgctacactcccaccagcgccatgacagcttataaatgccatggcaatgacaggaagttaccctatgtggtctaaaaggaggaggcatgaatactccaccctttatttagcatataatcaacaaataactgtaaaaatgggcaaccagcctggctgctctgcctgtggagtagccattcttttattcatttacttttctaataaacttgctttcattttactttatggactcaccctgaattctttcttgcacaagatccaagaaccctctcttggggtctggatcaggaccccttcccagtaacaagttctgagtggggccctacccagccttatctaatgccaaccgtatcaccctgaaaatccagcataactaatttgtatcatttgaaaaacagcctgtgaaaaaccatgcctcctgtatgtaacatcctggttcttgcgatatctcggtaccttccccacaggtccgtaacacatgctggtcatgttgctgctgagtaatggtgatcactctatggatatgctgcgtcacctttacctctattgtcacaggagctaggaggaactgagcacagcaggttggccaggggctatgacagcgttcccatggaaacctaattattctaatgtgtaagatacatactatcctattacagcatttagttataacagcctgagagttgcattactttcagaaatgcatgtgccttgtcgatcaagctgtaagttccttgagagcagaagccacgtgtcagtcaactttgtatctcaatgaattttggttgataagcagtgggtaaacttttggtgaagggatgaatgaaacctgaaggggattggtaaatacgccaccccaaaatatgccactttgggataggactattttgagatccgacagatgcagaaagaagtcttccaagagcttctctttcttaaaaaatctgactcaaatcagaaattcctgggaaatgaggactgccataaattgcctctccaagggaatttttaaggccatgaagaagacagaaagtcaccactgagatggacctgaacacacacaccttgccaagatagcccctggcttccacaagagttccccatgcatttaccttcccgtagtggactgctcttgaaagccccaaacccttttttctttctgtcaagtctccacagtttatctttctttgtttaaaatggtatatgagcttttcggcctattagcttgtttgtatgccttttctcctgataatctgtcttttgtcagtctaatttgcagtgctccagtgaatctaaaagggtagaggaaaaagggttatttgtttcccctataaactgaattataaattccattacaacagggtctatgtcattttatcttcttagtacttaacgtaaagcagtgtttaataggtcagacgtgctcaatttagggtatccaaagggagcagaattgtatatatacatatatatttcatgtgcaatatttacaatatatttatattcataatatatacaatattgcaaaaatcctaatagaagctataacattattctaaagattgctgttcatagcagggattatatcagtctgtgtagaaagctgtttttagcaaatgataagcaattcctttatatgtgttgatttacttcctatggcaaaaacaaataatatataaatattatattatatataaatataaataaattccttattatttagcaactgtgatgtttttgtaaagaaaatctttcacatagaaaaaaataaaagctcttcctgttcttggtggtaaatagtatggaaaccagtgcagtgcaattcaatttcaaagaattaaatatcactaaaacttgtttatttatttttttatttttgagacagggtctcactgtgtcacccaggctggagtgcagtggcacaatcatagctcactgcagcttcaacctcccacgctcaagccaccctcccatctcagcctcccaagtagctgagtttacaggaatgcgccaccacatgcagataatttttgtattttttgcagagacagggtctcaccatattgcccaggctgggcttgaactcctgatctcaagtaatctgcccacctcagcctcccaaagtactaactcttattaaatgttgtggtcagaacaactctgtccttagttatatggaagtgacctgcagcaggtgatggagaagaatcagaagactgactaagcaactttcagttacttcatatggatttcacattggtggaaaagcaggaacaaaaagaagtcttgattcatgcacagttgatagcaggagaccatttactggccctcatgagatcctccctggaagaggatcaatatcaagggtgaatgattcctatttcttcacttcctgtttgttcaaccagaaatttctacgtatgttgttgtattcctcaggacacttccaatttcaagtgacaaaaacccaactcaaactaatttgacacaaaagggaatgtactggctcttacaactgaaaagttgaaaagtcggttctagttcaggtatggctggatccaggacatcagatgatgtccttaagatgcacttgctctaccttcatcttcaggctctgcttccctctccctaaacaaagtttctacactgggcagtgcaaagtatctctgcatcttcatgtttaaatggttctttgatcccacaatcttcagaatgactctctcagtgcagccccacatcaaggactctgaaatgacaatgaatgcctctgcttgggttagatgcccactacaggacacatcactatattggggaggatgaggcatgattgtccaatctggctcaaatgctcagtcgtctgggaaaatggccatgtgtgtgaccgctccacagacatgagaggctgggatttccaacagaaagatgctaggaagacagaagagttgcttatgccctaagatcaagatctgtgtagagtgtcccctcaaccacccaaatcacaacctccccatataaggcctaatcggatgttttttgttgttgcttttgtttttgttttttgttgttttgttttgttttgttttgttttagatggagtctcactctgttgccatgctggagtgcagtggtgcgatcttggctcactgcaacccccacctcccaggttcaagcaattatcctgcctcagcctcccgagtaggtggtattacagccacgtgccaccatgcccagctaatttttgtgtttttagtggagacgggatttcatcatgttggccaggctggtctcaagctcttgacctcgtgatccacccgcttcggcctcccaaagtgctgggattacaggcgtgagccacctcgcccagccctaatcatatgtttttaagcaaaaggcctaaaaagcttcctcctaggttctgttcaaaactgaaacaaaacaaagcaaaaaataaaaataataataataatgattgaggaagccatgagattccaggcactatattaagtttaaaggcttccaaatgttcaacttctaatgaatgattcacttcacctcaatgcctctgttttagcaaaaagcacctgttctttaaaacagatttacctcttcagctgagatagaaattctaagatagaataatttaagagctagaaagggccaaataacagttttcatcagggaaataaaacaatgtccattctctggattggatacaacccaagaaaagccattacccagcagtgacatatgaaatatctgctttgatttcatgtgggagattatttagcaatgtcaagacaaaacatgccaattcctggcagttgtcaaaatgccattcctagtgtaaccctgacaaaaaaaaatccactccctctgcaaatgtcaccaagcttctgatggaaaatggatatatttgccagtttgggagaataaagaaaagactggaaggaagaaaaagtttccctttaggaggaaactagaaggaaaaggagggaggaaggaagaaagggaaggagaaaaaaaagggagagaagcagggaaggaggaagggtgaccttttagtctacccttcagatttatgctaaaagtttgccaggtcagaaaacaggctttggaattaagggagatatgagaccaacgtcaggccctgccacttaagagttacctacacttggtaacttcaccttcatttgtctcagtgtcttcactggaaaaatgaaaaataatagtacaattaataatggttaaaagaagcaacctggccaggcacggtggctcacgcctgtaatcccagcactttggaagtctgaggcgggtggatcacctgaggtcaggagttcaagacagcctggccaacgtggcgaaaccctgtctctattaaaaatacaaaaattagctgggcatggtggcgtgcacctgtaatgccagctgttagggaggtggaggcaggagaatcacttgaacccaggaggcagagattgcagtgagccaacattgctccattgcactccagcctggacgacaagagcaaaactccatttcaaaaacaaaaatgaagtaacccatgtgcagtgctgagcctggtgccaatctgtagagagcacaatacataagatctggtattataggcctacggaaacaatgtatcctggtgctccatggaaaacattttctttatttaaattcatcgacttaaaaacacctagacagaaattatgaataggctatgcctctttatttcataggcagaatggcaagttttgaataaaagtatgctcttgtttgacacatggaaaataggaaaaggcatctgaagaatcttcacattatcaagcctgaaccttcgcagaacactagaggtccctcttggcactgaatcctccagccccgatgatgcagaattcagagtgacaattttctgcctcagccccactagatgtctcttcaataaagttctaatacagttagtgccctggcattgattcgatgcctgggaaccattacatagaaagaacatagttttaaataatcaaaccattttcctaaatgtgcatacattctagaagccaccctccactgccacacacataattcaaactgaagatgtcttttgttttccagaaccattgcctgatattaagatgatatcagggaaagggagcaaaggtgacaaggaagttgtttcgattaattgggaaccatagatcgtacttggaagccatgggggagatgccctccacgaaattaaaaatgaagttactctctcagagttaaatcaccaaatcaatgggagtgctagcaatgtggctttaatggcccaggttccagtaagcagaaaagtcagacttctgtcttctacatagccaacttcctcaaaacacgaaagaagagaatgcctttctgaaggaaggcaatttcttctagttgcatctaatcaaaactttattgtgtttctattgcctgctgttttcctaagaaacgttgaattactgggatgatacctgattctcaccagctaccagaaccacctccttagttttcagggagtgttttttgacacaaaccacttcaacagcattgcagcagctagtttaaaaggcaatattttgtcttgtgtttaataagcttaaaaactcacaagcccacctagcatttctaaccagcatttatccatttgtctgaatggatcgaagattgcctcatgggcataataactgactttaggcataatggttgtgatgcctggcacagtggggtattctgttaggggagcgagagagctgtggacagggaaatcacgtagcttgggaagcctcaaactacaaagatatagtagcaggtatgggcaaggcacagagaagctgaaagtggggtgcatgcgagaccacaacataggctggtattgtgtttaagaaatttcaatgtaaatgtctttaggcaggggattcacccgagttagccaccatttccaccatattccattgcttcctattgtcttaggcctggggtaatttgataacctcgaacatctggcccctttggcctgagtcagagctgttttttcagggagggtttgctagaaagtaaatgattgggacaattagagagattagaataagatctatagatttagataacactatcataacaagtctaatttactaattttgatcattgtactgtgattatgtaagaaaatagttatttttaggaaattaactcaagtatatgagagcaaaggcataaagataaaaataactacagatgacaatgtctcattccagatctgccatataaggatttctagaagtgaggccctgaaacctgcatttaccatgatccccagggaattcccgtgcaccttcaagactgagaggcccggatctgtaacacctgctgaagaatgacacccatttacgagataaagaaaacactgttctttgctgctcccctggttaccctcaaaagccagaaagaagggaggatgaagagaaagtcagcctctgcagacatagctgtcatttgtaactgctgctgtttcccagtcagcttaaatggaaaatggactgctcttacaccaacgtcacttaagtccatcacggcagtactccaggtcctcctttcccatgtattgcctgagtggggcacattgccccctgacagacacaggatgctgcccccaggccaacacttagagctagaacagcgacgctcatcacagagctagaattgcaagctcagtcaggtacagggagtgttgtgcctgattgcaaaaaactgactcagcctttcagtaaaagtgccttagggaatggaactagattgtcctgtgacaaaccaatgaacacatctgcttgtctcaaaatatgtgaagcagaaccaagcttccagtgctgaacacaggactgctctagtcaccaggcagcatcctttcccaaagaaggtttcatagaacactagcctagtagatgatcttggcaaaaaggaacccataactaagtaagttctggaaacgctgtattttgtttctcccctcttggaaactgaagatgcacattaacatattaagtgctctgaaaagtcacgcactgaagaaaaaaccagtatgactcttgtttagctcagtatttcctgaatatgttctttgatgagactcctttttcattgagtgcctattaatattttctagaataaggttttaaagaaaaaaactgaggaaacgttatagaggagaatttatattcaaaggggaagtcatttagttccataaatggaacgttaattggagaaagattggcagttgtgaagcacatctaaaagtattggcagagcctctgaaggacttgggaaatggacttccattccctgccaggaaacttccttaggaataaagggactcctttggtcctgatcagaaagggagcagtattccttgtctgcattagagtggaatattgggatgattagctaccagaagagtcctctttgatctttcccactccttcaaccccgtatccattccaccggaaatcctaccctacgtcctcaatctcaatctcccacttccagtgctgcaacctcagctcactgcagccttgactttctgggctcaagcgatcctcccaccccagcctcccaaccatctgggaccacagggaggtgcaatcacgcctggctaatttttgtatttgtagtagacacagggtttctccatgttgcccaggctggtctctaactcctgggctcaagcaacccacctgccttcgcctcccaaagtgctgggattataggcatgagccactgtacccagcctcaatctcccacttcttacacatccactgctgcaatagtctactcactggtttccctactttcacttttattctcctgctatggtctgaatatttgtgtcccacaaaaattcatatgttgaaattctaacccttaaggtgatagtattaggatagtattggggcctttgggaggtgatgaggtagtgagagtggcaccctcatgattgggattagtgcccttataaaagaggccccaaagagagccctgaggttgcagcgagaaggccacatctatgaaccataaagccagccctcaccagacaccgaatttgccagtgccttgatcttggacttcacagcctccagaactgtaagaaataaatgttgtctataagccagccagtctgtggtattttgttataactgcctaaacagactgacacaacatctagtgtattgtccatactgcagcaaggtgatcttagcacttagaatctgataaaaatcacactgcttaaaaacttccaaaacctgtcccttgccatggagaaaacacaaagataacataggcctggcctggcatttcccttcaaactcatcttcactaatcttccactcatctgcatgttccagccacactcctcttctcctggattctctttacctggaattctccttcccatctcgattttgcctatttgcccttcaatatagatcacggtgatctatgatggtcatagtgatcacagattcatcacagaacactatgcaaaaatcatttcctccaggaagactttcttgattcaacagtctaggttggagcagctcaagtgcaatccatacttcggtgccaatctacaaattgtttccaatgtgataaatattaaaattaagaaataagcatttagaaagttctacagtgttttaaaattaccatgacatccaagcacatggtcagtagactccccttgttgaacagggcaaagagcaattcaggtgttgtcaaaatcacgtggtcagtcacatgtagcacaatttgtatgctagtatcagtccagggcagattgaagggaaaagtggtctttcagcacacatagttagagatgcactggtctaggtcactttgtcatgttatatagtcacagcaccatgtaccttctttccaaagcatctatcacagttggtaattttatgtattttttgcgaacttttttcttattgtctttctcctacacaagactcctagcttcctgacagcaagaaccaaccaggcttgttgctgctcaatgtcaaatctttctagtccagctgaatacctgggacacagttggtgcttaaacaatgtgactaataaataagtggaaaacgtatacctagtgagccttgtcatcaattttaatactgtatcacctcaacaccattcttagcacttactgagttacctgtggcttatatgtgaggataagggtgagcaatgagagagagatgagagaataattatttcattttatgaactcaaccagaccctttcagatcacatttcaatggcataataggtataaaatgagtagtgaacaatgatgttttaagggtacaaaggaatgctttgtctttggtaacccatatctgtgacctattgtcacacatcttgggtatttcgttttgtttgatgtttatatttgactctaattaagcaacatcataaaatttcattgccctcccagcaacagagctcatgccagctttcggtgatgttgtgtttcctcacccagctctatcctccctgcctttgttcacagctgttttgctgataaaatggagagaaagagagctggtattcagctgacagcttgcttctggcagctgctggacctcagagcataatttcctccctagtgggttatcagaatcaaacaccctcgactaatcagaatttcaaagaaagcagatatccagttgaatttaagaagattattccaaaagagctctgagtaggacattggacttttggcaccctaactatttgctcaaacaggcatcagagtcagctggagtcttgaactttttccaggaaagagaagaaattttaatatagtgaaaagagcaatggatggtggtagcaagtcttagccctgctctgggaaaggtacctaatctccgtggtttgatttcctcatacgttgaaaagggggattggaccagatgacctcttgatctcttctagctctgaaattatggaaatgaatgattcagttcctagacagaggtttcaagaatgctaaggagctgagtatctgttcccagatggcaaagttggcaaagtttatataggacttaaaggtctttctatttactactcattcagtttaatccttcttctgaaagacagtacagtatttacctcttgcctaatattgtgaacatgaatttgtttatacaatctcatgactctgagatctaactctaattccataaatagaactataaatactaatggtattcccaaaaacatcatgcttggtgaaaatgttctaggatcaaatacgtttctttctttctttctttttttttttttttttttttttgagatggagtttcgctcttgttgccgaggctggagtgtaattgtgtgaactcagctcactgcaacctctgcctcccgggttcaagcaattctcctgcctcagcccactgagtagctgggattacaggcatgtgctgccacacccggctaattttgtatttttagtagagacggggtttctccatgttagtcaggctggtcttgaactcccaacctcaggtaatccgcccacctcggcctcccaaagcactgggattacaggagtgagccactgcgcccagctggatcaaatacgtttctgaaatgctgtactcaatatcctctccttaatgtttcacatggcagaagggtgcattaaagcctagaaagtcatgcgctaaagaaagcccacttaagtttgcttgccctagaatttctcagcgttgaagtcttttttttcctctggaacacttgttttcatttttattttttaatttttatttatttatttatttatttatttattattatactttaagttctagggtacatgtgcacaacatgcaggtttgttacatagctatacatgtgccatgttggtttgctgcacccatcaactcatcatttacattaggtatttctccttatgctatccctctcccagccccccacccctcaacaggccctgatgtgtgatgttccccttcctgtgtccaagtgttctcattgttcaattcccacctatgagtgagaacatgcggtgtttggttttttgtccttgcgatagtttgctgagaatgatggtttccagcttcatccatgtccctgcaaaggacacaaactcatccttttttatggctgcatagtattccatggtatatatgtgccacattttcttaatccagtctatcattgatggacatttaggttggttccaagtctttgctattgtgaatagtgccgcaataaacatacgtgtgcatgtgtctttatagtagaatgatttataatccttcgggtatatacccagtaatgggattgctgagtcaaatggtattttctagttctagatccttgaggagtcgccacactgtcttccacaatggttgaactaatttatgctcccaccaacagtataaaagtgttcctattcttccacatcctctcctgcatctgttgtttcctgactttttaatgatcgccattctaactggtttgagatggtatctcattgtggttttgatttgcatttctctgatggtcagtgatgatgagcattttttcatgtgtctgttggctgcataaatgtcttcttttgagaagtgtctgttcatatccttcgcccacttgttgatggggttgtttcttttcttgaaaatttgtagaagttctttgtagattctggatattagccctttgtcagatgggtagatagcaaaaatgttctcccattctgtaggttgcctgttcactctgatggtaacttcttttgctgtgcagaagctctttagtttaattagatcccatttgtcaattttggcttttgttgccattgcttttggtgttttagtcatgaagcccttgcccatgcctatgtcctgaatggtattgcctaggttttcttctaggttttaggtttaacatttaagtctttaatccatcttgaattaatttttgtataagatgtaaggaagggatccagtttcagctttctacttatgactagccagttttcccagcaccatttattaaatagggaatcctttccccatttcttgtttttgtcaggtttgtcaaagatcagatggttgtagttgtgtggcgttatttctgaggcctctgttctgttccattggtctatatatctgttttggtaccactgccatgctctcttggttactgcagacttgtaatatagtttgaagtcaggtagcgtgatgcctccagctttgttctttttgcttaggattgtcttggtaatgcgggctcttttttggttccatatgaactttagtttttccaattctgtagagaaagtcattggtagcttgatggggatgacattgaatctataaattaccttgggcagtatggccattttcacgatattgattcttcctatccttgagcatggaatgttcttccatttgtttgcatcctcttttatttcattgagcagtggtttgtagttctccttgaagaggttcttcacatcccttgtaagtgggattcctaggtattttattctctttgaagcaattgtgaatgggagttcactcatgatttggctctctgtttgtctgttattggtgtataggaatgcttgtgatttttgcacattgattttgtaacctgagactttgctgaagttgcttatcaggttaaggagatttggggctgagacaatggggttttctaaatatacaatcacgtcatctgcaaacacggacaatttgacttcctcttttcctaattgaatactctttatttctttctcttgcctgattgccctggccagaacttccaacactatgttgaataggagtggtgagagagggtgttcttgtctggtgccggttttcaaagggaatgcttccagtttttgcccattcagtatgatattggctgtgggtttgtcataacttgctcttattattttgagatatgttccatcaatacctagtttattgagagtttttagcatgaagggctgttgaattttgtcaaaggccttttctgcatctattgagataatcatgtggtttttgtctttcgttctgtttatatgctggattacatttattgatttgtgtatgttgaaccagccttgcatcccagggacgaagcccacttgatcatgatggataagctttttgatgtgctgctggatttggtttgccagtattctattgaggattttcacattgatgttcatcagggatattgatctaaaattctcttttttgttgtgtgtctgccaggctttggtatcaagatgttgctggcctcatacaattagttagggaggattctctctttttctactcattggaatagtttcagaaggaatggcaccagatcctgtttgtacctcaggtagaattcggctgtgaatccttctggtcctggactttttttggttcgtaggatattaattattgcctcaatttcagaacctgttattagtatattcagagattcaacttcttcctggtttagtcttaggagggtgtatgtatccaggaatttatccatttttttctagattttctggtttatttgcacagaggtgtttatagtattctctgatggtagtttgtatttctgtgggatcagtggtgatatcccctttatcattttttattgagtctatttgattcttctctctttcttctttattagtcttgctagtggtctatcaattgtgttgatctttcagaaaaaagagctcctggattcactgaatttttggaggttttttggtgtctctatctccttcagttctgctctgatcttagttatttcttgtcttctgctagcttttgaatgtgtttgctcttgcttctctagttcttttaattgtgatattagggtgtcaattttagatctttcctgctttctcttgcgggcatttagtgctataaatttccctctacacactgctttaaatgtgtcccagagattctggtacgttgtgtctttgttctcattggtttcaaagaatatcttcatttctgccttcatttcgttatttacccagtagtcattcaggagtaggttgttcagtttccatgtagttgtgtggttttgagttagtttcttaatcctgagttctagtttgagatggcactgtggtctgagagacagtttgttgtgacttctgttcttttacctttgccgaggactgctttacttccaattatgtggtcaattttagaataagtgcaatgtgctgagaagaatgtatattctgttgatttggggtggagagatctgtagatgtctattaagtctgcttggttcagagctgagttcaagtcctggatatccttgttaaacttctgtctcattgatctaatattgactgttgggtgttaaagtctcccattattatttgtgggagtctaagtctctttgtaggtctctaaggacttgctttatgaatctaggtgctcctgtattgggtgcatatatatttaggatagttagttcttgttgaattgacccctttaccattatgtaatgaccttcattgtctcttttgatctttgttggtttaaagtctgttttatcagagactaggattgcaacccctgcttcttttttttttttctttccatttgcttggtagatcttcctccatccctttattttcagcctatgtgtgtctctgcatgtgagatgggtctcctgaaaacagcaaactgatggttcttgactctttatccaatttgccagtctgtgtcttttaattggggcatttagcccatttatatttaaggttaatatggttatgtgtgaattcaatcctgacattatgatgttagttggttattttgctcgttatttgaagcagtttcttcatagcattggtggtctttacaatttggcatgtttttgcagtggctggtaccggtcgttcatttccatatttagtgcttcctccaggagctcttgtaaggcagggcaggtggtgacaaagtctctccacatttgcttgtctgtaaaggattttatttttcctttgcttatgaagcttagtttggctggatatgaaattctgggttgaaaattcttttctttaagaatgttgaatattggcccccactctcttctggctggtagggcttctgctgagagaaccgctgttagtctgatgggcttccctttgtgggtaacctgacatttctctctggctgctggaacatttattaacacttactaagctaggattccactgaacaaacttggaaaatggtgctgtaagagggatctgtgcacccacgagcatcctccacttggtagaggccaggaagttctttcaaaaggccaatactccagtccaccccagacttcctgaatcagaatcttgggaggtggagtccagaaatattagctttaacaagccttccagacaatggtatgctggagctgggaggtatcaactctccagaacagattgttattaaaattccagcaattttagaacttcgtgagctatttgacttcacattggtagactgaaatttgctgtggtagaagtatttacaccatgaaaattggcagatgctacaattcagggcttttctgttctcccccagacagctagttattagacatttatccataaaccactgcctccaggtcatccttacatacattaaaatttgagacccactgataatgcaagtatgtgctatttccagaaggaattatgtcaaaactgttaaaatttaatccctagttttaccatgtttttagatattcctaaaaaagatgtgcagaaaaaaaatcttacattttcttttcaaaattaagtagaaattatctaggaatatctagaaataatcaagtaagcagaacctcattatgaagaagcaatttttttgtctttacagactttggttgttgtttgggtttgttttttacaatgtattttttattttttattttaggtgcaggcatttaatcataaaattaatattttgtgctttggcagttaaaaattatatatttaaggtgtgtgtaacttgatgatttgatatacatatacattgtgaaataatcaccacaatcaagctaattaacgtatctatcacctcacatagttgccatgttttgtgtgttgtgtgatcagaacattttagacctctgtctcagcaaatttcaagtgcacaatagtattcttcactaaatttacagtgctatatattagatcttcagaacttatattttgtataactgacttgataccccttgatcaaaatctccccattctaccccaccccaccccagcccctggcaaccaccattccactccctgatcctacaagtttgagtgttttagataggtgagatctcaagtattttttcttctgagtctggcttatttcatttagcttaatgtcctccagcttcatccatgttgtctcaatggcaggatttcccacttttttaaggtcaaataatatttatttatatatatcacattttctttattttacaggctttctaaattgagatatgtacaggtcttgctgacagatatagctttcttgctcacagatatagctttactgtggtctattctttcataatctggaaaaaaaatctagaagtataaaaatattctcgccaggcgtggtggctcacacctgtaatcccagcactttgggaggctgaggtgggcagatcacgaggttaggagatcgagaccatcctggttaacacagtgaaacgctgtctctactaaaaaaaatacaaaaattagccaggcgtggtggcaggcacctgtagtcccagctactcgggaggctgaggcaggagaatgacgtgaacccagaaggcggagcttgtagtgagctgagattgtgccactgcactccagcctgggcgacagaccaagactccttctcagcaaaaaataaaataaaaataaaaaaataaaaattttctcagattgttgtcactttttaaaaaaacttatatactcctcttcgccaccacctttcattgaaaagaaacacatctcacacctgttcagattttagctgggctcttttgtcccactggtgctttaggggtattgatatagtacattatttctttcttaaaggggatgccttggactgatccaattagagtcctgatctcacatttgatagcaaacacagagcccagaatgatcttttctttatttctctggttcaagaaaagtacagaatccaatgacagaagcagaaaatagattgtgagatggaagagtctgagtttccacttaacatttgtccttctgttccctctgaaggtggacaacatgaaagtgactgctggactaaaaatggttttgcttgaacagcttaactgacataaacatacgccactgagagtcatatcccaggtcactagaaccttgacccaccaccaagatgtatttaatttttgtgaatccagcagttaattctgacagccaaatgctaccaggttgtttatctctcttgtaaaatgccatatgttatatgcttagaggcaagcatctcatgtctccattttaaaattaacaagttaatttttatagcccaaatcttaagaatttgagcatcagatgcctttaaaaatttggtatatttttatgtcatacttttaaattatttccatctaatagtgtttgctccataaacaaaatatgtcacttataactttatatttttgtaagtttttatgtaagttaaagaaaattaaatatcttgtattacatactaaattagaaaaataaaacctattgttatatagttgaacattgagttatttaaaattaacatcaaaatacagtatctgaatgtttttacaaaaaattcttatcatttacacaaaataataatttcttttaatttttaaggagatttgaaaagagtttagaatttgaaaacattttgctaattcagccttcaagtaaattcatgtaacatggaatatacacacttaaaagctggctacacctaaataaaattccaaagaaatctttccgaaatgatagagtcgctgacccataatagggaaatgtttggggtcattgaaacctttatcaaattgttttaatctaacttcatgattacctacttgcccagcaatgtagattattgtgttttgcaggatgttaacattgaagtttgaactgaggtacccacccttacaaatataggatgtcaaaatgaatacaacatactgcatatgtacaagatttacaaagaattatcgaacttagcttatgatgtttagatgctcagccagattaaggatatacaaaggtgaagggtttaaaagaatttttagagagttattgccatactatgaatgtctgtttccacccctatccttaaggctccaccttgagcttaacaggcctgtggacaggtcatctgtacttctacagcgagggcaagggatacatgaatggttcccttggacagagcgggccttgagagaaatccaatggaggtcaacctaggacttcccaaagggctagaaggaatctatcaacaagaagctggaagggaaaattggatgtctactcattccagaaagagttggaaatgaccatacaaattctcaaggagaggtcagcaatatttctctggaaagggtcagatagtaaatatttcaggctttgagggctgtaccgcctttgtagcaactactcaactgtttggttattgcacaaaagcagccataagcaatgtgtaaacaaatggatgtgtctatgtgcaggtaaaactattgacaaaaacaggtggcaggttggatggagcctacaggccatactttatcaaccctgctatagatgcatcagcttgagacaaaggaggaggaggtgagcagagcagagcccagctatggaaaagcccatgaaggtcaagttcacttcaacatcctgccaggtctgcagcatgttcacacgacagccttccccattcctcattcctcttccctccctggcacacctatcctggagacattagaagctggccagcgagctggtttgagacaggaggaaaagccagagaaagagaaataaagaagcagcagccaccaaccctgcaccctttctccccagcaagcttccagcctggggaagacagccaagagaggagcgaatatttgacattaactccaattcagagatcctggactgaacactcttaatttctgaatggagacaatttccaacttaaagtgaccagagatagaactgtttattccctaagaatcagtagaaaagtcacaggacagaggaagggaaaaggaaagctatatttttatttttatttacttatttttcaccctgtcttatgatgctgagctatatttttattaaatcacacttgctttttctaaatactggttacatacacaagcccagagtcaaacattttcttaccctatctgaagactccagcagtaacagagaaacaaataacgatgacatccacctcagccacgtctggcaaacttgacacaagcggctcaccaagaaggcaacccagcagttaatgttactgacccatttgtcatatccagtttctccaactgtccataacaggtatttaattatagaggatgattggggattcatttgtccttcaggaaatttcacgactaaggtatgtctttcttccagtaacatgcacacactcacacagactcatttaattctcaaacctaacatgattaggttggtctaggaaaggcctctctgagaaggtgaattaaagttgatctggacgatgagagacagtcacgcagagatcaacaaggagtacattccagagaggggaaaatgttcatgcaaaggacctatggtaggaacaaatgtcagggagcagaaagaagcttggtgtgtctgaagcctgtgcatgatgtgaggatgataagaggtatgtacagagaggcaggtgagggtcatgtgctgagggcttttcaagaaaggactttgctgcatttggattttattctaagtttgacaaaaagacagatgatggggggcattaaatcaggagaataacataaacatgacctgacctacatttttaatattgtgttctggcttctttaggaagaatgaattgttaggagataataatggaaaatcaatacagaaaccattagagtcctctcggcaagagatggtggtgtacttgccttaggatagtagtaaagatgaagaaaagtggaagaattcggggcagactttgaaatagaattggcaggacatgctgagagatggatgtgggaataagggaatagagggaatgagaataatgtctagatttgtggcttgagcaactgggtggtggtgtgaggccacttactgaaatggagtctgctgaatagaaacagatggggaggttggtaaagaataaagattgtccttaatcgtgttaggtttgagataccatttggacacccaagtggagatatcaggtaggcagatagacttgggcaagtcagtgctggaaagcaatatttggggttatcaacataaaaatgctacttgatgccataagaataaatgaggtcatcaagggagagaagaacagaaagaaaagtgaagaaaaaaatcccaagtcataagccctgggatattccattgttcagaataataagaagaaagaggatccatcaaactagtctgcaaaaaagcagcctgagaggtggaaaataaaccaagcaagtgtagtgccacaaaagccagaagaccaaagtgttctgtaaagaaaggaatagccaactgcacctaatgctgtagagatgccaggaaaggggaggaagtgatgtgactgtaatcagcagcctagaggtcatcggtgggcaattcaagaacagtctcaatggaggtgggatcacaagttcagtaaaatggggatgaagtcattaactacagaaaagcaacttaagacatatcaccaagacaagtagcagagtaataaggaagtagctattaataaaaaaaaatttatcagccaagtatgaaatgcaaggcattgtactaagtgcaattggagaataggagagaaacactttacattccatgctctatagagctcaaaaagtatggcaaggcattggaagactaatcatggtgacatgtatttattagctattgccatactaacactatataacaaatagtccccacaatacaatacacaataaggattaatctcaaacacaataaggattgatttttgcttgtaagtcagctggaaggttctgctgattggagtctggctcagggagtaggagctgggcttgttcaagtgtctgtactcagggcctttctcggtgccagaaccttggtgagtgcaaaagttgcttgtccatgagtatggctctacccaccaaattggaagaacacgatctgccaatgaagagaatgaggctagcatataaagagggatgaagataattattaaggagtcttaactatacctttgagcttgaatccaaatatgcctgaagtcttccatcctgcgcttcccagtaacggaaactaaaaacctcccattgtgtttaatatagtcttaattggactctgccacttgcaatccaaagagttctgaccaatacatccaagttaattttggacctttaaaaaaataaatatccattgatgatttaatcaaagagagattattttaagggggaatttaggaagattcattttcacaaactggttaggagagataataaactgctgagatgaagtccagctggcaagaatttcataatttagttcctgaggataaaaggaaggaaaatcccattttcctgtaccacagctgatattcagttggttcacataggtatagccatgctggttatttaatgccagcatccattctgataagtggtatccacatcttctgattattaggtatcttgattatcactgctgtccatatctatgctgcaatatatgttcaacaaagtgaagctgcttaggaatattttagaattctgttttctctctacctatgatgtgtaacctcaatttctttcaccttggatatcaagatgcaacagaataaatttgtctgcagcctggatgaacttgctccccacgagagggactgactttactcatccttctcttttaacccagtcatgctgaaattatcagagagagccaggcagaatgaaaatggcagtaacatccagactctcctagacattgaccggaagttgacctctggccacagatgccagaagcaggcaggcaaggaagggaccaaggagaagccatcaagaaaatgaaggtacgataaactgtgaaaattgcgttggcaatgcatgagttaccactgagtcaacctatatttccaacaaaatcctggagaataagcctgcagaatacacagactaaaaagatggcggctccccaccccaaaacaccttccctacccaccagcctctgctcaaaataccaccacacaaacttgattttttaatctaaggaaagaatcaagcagatgaactatgattgaagcttattttgtaatagcaatgattcaaaaacaaactctatgtccaaacttagtcagctttccctgactggctaaataaattatgatgtgcccatacaatggtgaggcaggagaatagggtctggaggcagagaacctaagatcgattcacattgacttcttaggactaaatcaaaaggaaaaccccaactttccacaactaagaaacaaaagtgtggaagcctacttcctttgcaaaccctccacccactttttctgcctggcagatggaaaattgaacatatctctgattggttgcagaaagcataggagtgtaacttttgtaactttacttcagcctctgatgggttgctttccacaaccattcagacacttgcatagaatgtaacctttgtaacttcacgtcagcctctgattgtgggacccacttcatttacctagggtgtacacaaaggaaccagtgggaaacctctagagggtatttaaaccccagacaattctggaaccaggcttttgagcccctatgctcggccagcacccaccctgtggagtatacattcattttcaataaatctttgcttttgttgcttcattctttccttgctttgtttgtgtgttttgtccaattctttgttcaagatgccaagaacctggacaccctccaccagtaacaatggaatactgtaattccattgagcccagacagtgtcacgtgccacccctacctgcatgggatcctggggaggctaataggtttagttgagaatattaccatcttgaacaaagtcagagttctcatcagaaagaagtagaaatgacaacttgctgcatctgccacgcaacttcaatatcctgcaatatgagattgtttgagaaacgaatgtacaaccacatgatggaattctctacagatgtctaatgctagagaaagaataaaggggaaaattgtgtggtaaatgttttagacattttaaatgaaaaaagcattttcatttaaaaaatgaaaaagttgaaaaaatgtaaataatatgatcacgtgtgtgtatatgtttgcgcgtggatgggtgcgtgtgtatctcctagtacatgcatagaaaatctgtggaagaggctgggcgcggtagctgatgcctgtaaccccagcactttgggaggccgaggcaggcagatcacgaggtcaggagatcgagaccatcctggctaacactgtgaaaccccgcctctactaaaaatacaaaaaaattagccgggcatggtagcacgcacctgtagtcccagctactcgggaggctgaggcaggagaatcgcttgaacccaggaagcagaggttgcagtgagctgagattgcaccaccgtactcaagcctgggctacagagcgaaattccatctcaaaacaaacaaacaaacaattacaaaaattagccaggagtggtggtgggtgcctataatcccagctactcaggaggcttaggcaggagaatcgcttgaatccaggaggcggaggttgcagtgagccgagatcctgccactgcgctccagcctggccacagagcaagactccatctcagaaaaaaaaaaaagaaagaaagaaaagaaaatctgtagaagaatacgtaagaaagcactattggtagttatttctggaagataagactgagaaggaacatgacatttacttttcacttcaatccatagtatttctcttgtcattagaatcagagaatttattggtataaaaatacccaggactcctaccgtggtaatttgaaaatttgtttccagatagtctaaatataaaacactctggaaaaagctgcctcaatcctgtcccctgggaccctcagcaaggggcctgttaaccacgattccacttcagcaaagaagccccaccagaaggaaaaaaccacgcaccagccaggactctacgggagagagaagcccaccaaaggctttagaggataacatcgcagttgttctccatgttacttttttctccaaggtaaggaatacactcctaaatgttcctaaactcattttgctaatctgatttatcataataaccctcaataaaagtcctcctttgtatttaagttaaaactctttatgtaacctataattttagttctatcaggctcacagaaagttggtcaccatcctccctattgtaattaaacactcaaatgcctcctaacgactaaagaaattaaacctatatatctaggacccaggagccaaaaccgtaacagctcagacaaaagcttgagtttttttaagtttgtattttatattaacaattttttagcattttacactctactccatgatatagctataactgattcccactaaaataatttcttcctctcccctctcttctggaatatttgaataaattgatattccaggaagatgtgtcttgttttcgcaaaggccacccccaacaacatattccctcagattatgctttcatatgacctcatccctcaggcttttctacttttaagtcaaccatttctaattctcttaacccatagacataggtcccaatttttcaattcttcaaatttccccatcattttcctccaaagcctattccacttatcactaacgctcaaataatgtgctctaaaattcactgcagtgctccaatgagatgctgttggaaagggtctcaatttatgctcccattttctctcccctcatatttgtacacccactgtttatttgtacctctgtacttcctggaaggaagaacacatttaataatcaagccaactagtattgctgaggctttctactaaaaacttgtagatcattgcatagagcacagcaggactgattagtatgccagggtgaagacattgaaaaaataaactagaaaagtccaagggaagttgtgatagactgtgtgaagtttagaatagaaaatgggttcataaattaaggagagacgtgggaaattttgcaaatatatgcataaagtgaacagccaaacggtgagtttcacccagtgtaacacccagcatctgtcccaatttgaagcccttacctttaagcaggccggcctgcccagcagttcacatagcctcagcgagagggcatgccaagaagtctgctttgttccccggccaatgctggaccttcctgccgagacatgcctcacactcatatttcccagcctgttctaatgacgccagctctcaacttctcagctgctgtctctgactttgctcctctgtccaatgcctgatattattgtatctctgggattaagccttggttccctgaaattgcattcaccacaaactacatgtgcttttagctgctccagagaacatcctagcataatctggcacatcctctggacaaaaccctggttggacctagccaataagacagaagttactgctgggataatcccagttgctgaagaggaaaactatgtttatctatgcatactaatatgactgaaaaaatattttctttattaatctatggagaaaaatgtccctaacacagtctgggacaaaaatcactttacaaggttctttacaaccttct

SEQ ID NO: 2065 - DNA, 16 bp, synthetic construct
  source 1..16: mol_type = other DNA
ggacgactaatacacc

SEQ ID NO: 2066 - DNA, 16 bp, synthetic construct
  source 1..16: mol_type = other DNA
agtctccgcaagtagt

SEQ ID NO: 2067 - DNA, 16 bp, synthetic construct
  source 1..16: mol_type = other DNA
tagatgcggcttgtaa

SEQ ID NO: 2068 - DNA, 16 bp, synthetic construct
  source 1..16: mol_type = other DNA
gcttgacacagtaccg

SEQ ID NO: 2069 - DNA, 16 bp, synthetic construct
  source 1..16: mol_type = other DNA
ctcgcagtacagttac

SEQ ID NO: 2070 - DNA, 16 bp, synthetic construct
  source 1..16: mol_type = other DNA
tgtgccacggcttgac

SEQ ID NO: 2071 - DNA, 16 bp, synthetic construct
  source 1..16: mol_type = other DNA
ccacttagtaatcagc

SEQ ID NO: 2072 - DNA, 16 bp, synthetic construct
  source 1..16: mol_type = other DNA
ctgggttaagattggc

SEQ ID NO: 2073 - RNA, 20 nt, synthetic construct
  source 1..20: mol_type = other RNA
tcaaggctgcagcatgagtg

SEQ ID NO: 2074 - RNA, 20 nt, synthetic construct
  source 1..20: mol_type = other RNA
ggagcctgagaggaggacga

SEQ ID NO: 2075 - RNA, 20 nt, synthetic construct
  source 1..20: mol_type = other RNA
gtggctcgcctaagctgtcc

SEQ ID NO: 2076 - RNA, 20 nt, synthetic construct
  source 1..20: mol_type = other RNA
gtaccctgtagtgtcagccc

SEQ ID NO: 2077 - RNA, 20 nt, synthetic construct
  source 1..20: mol_type = other RNA
gccgggccctctaagcagag

SEQ ID NO: 2078 - RNA, 20 nt, synthetic construct
  source 1..20: mol_type = other RNA
ggtccagcagaaatgggaag

SEQ ID NO: 2079 - RNA, 20 nt, synthetic construct
  source 1..20: mol_type = other RNA
gggcgggctcagcagtgatg

SEQ ID NO: 2080 - RNA, 20 nt, synthetic construct
  source 1..20: mol_type = other RNA
aggtagaatagatccagccg

SEQ ID NO: 2081 - DNA, 16 bp, synthetic construct
  source 1..16: mol_type = other DNA
tcctatcgtcaaccgg

SEQ ID NO: 2082 - DNA, 16 bp, synthetic construct
  source 1..16: mol_type = other DNA
ggtgtattagtcgtcc

SEQ ID NO: 2083 - DNA, 16 bp, synthetic construct
  source 1..16: mol_type = other DNA
gtaaacgcttccgatg
